(19) United States
(12) Patent Application Publication
(10) Pub. No.: US 2009/0208520 A1
(43) Pub. Date: Aug. 20, 2009

(54) PRRSV GP5 BASED COMPOSITIONS AND METHODS

(75) Inventor: Byoung-Kwan Kim, Mankato, MN (US)

Correspondence Address: Patentique PLLC, P.O. Box 5803, Bellevue, WA, 98006, US

(73) Assignee: MJ BIOLOGICS, INC., Mankato, MN (US)

(21) Appl. No.: 12/111,871

(22) Filed: Apr. 29, 2008

Related U.S. Application Data
(60) Provisional application No. 60/915,049, filed on Apr. 30, 2007.

(51) Int. Cl. A61K 39/12; C07K 7/00

(52) U.S. Cl. 424/186.1; 530/327

(57) ABSTRACT

The disclosure includes compositions and methods for the production of an immune response against porcine reproductive and respiratory syndrome (PRRS) virus, or PRRSV. The disclosure is based in part on the use of two or more peptide domains, each with a different sequence, from the PRRSV GP5 protein ectodomain. Compositions and methods comprising polypeptides containing the two or more domains, or nucleic acids encoding them, are described.

### RELATED APPLICATIONS

[0001] This application claims benefit of priority from U.S. Provisional Patent Application 60/915,049, filed Apr. 30, 2007, which is hereby incorporated in its entirety as if fully set forth.

### FIELD OF THE DISCLOSURE

[0002] This disclosure includes compositions and methods directed to the use of porcine reproductive and respiratory syndrome (PRRS) virus, or PRRSV, polypeptides in the generation of an immune response against the polypeptide, and therefore PRRSV. The disclosure is based in part on the recognition that use of more than one GP5 ectodomain, differing in sequence within an HV-2 hypervariable region, allows generation of a broader immune response against PRRSV than with the use of a single ectodomain. Also disclosed is the use of nucleic acid molecules encoding more than one ectodomain to produce a broader immune response. The description includes compositions containing polypeptides with more than one of the ectodomains, or one or more nucleic acid molecule encoding the polypeptides. Also described are methods to produce an immune response by using polypeptides, nucleic acid molecules encoding them, and/or a composition of the disclosure.

### BACKGROUND OF THE DISCLOSURE

[0003] PRRSV belongs to the family Ateriviridae, one of animal RNA virus families. Antigenic properties of PRRS viruses, like other RNA viruses, continually change, which results in a most problematic issue in developing an effective vaccine against this disease causing agent. However, there are fundamentals that are not changed in the PRRSV biological system. Importantly, the virus infects a host cell of a multicellular organism for its replication or growth. To infect, the virus must attach to a host cell as part of its life cycle. For attachment, the virus must have a viral receptor recognition protein (RRP) that recognizes one or more specific receptors on the host cell. Last, the host cell's receptor generally does not change because it is usually required for a particular function and so not intended for virus recognition.

[0004] But a virus utilizes the cell's receptor to attach or recognize the host cell. Rather than modifying the receptor structure, an organism containing the host cell may produce antibodies that recognize the RRP of the virus to block attachment of virus to the host cell. The antibodies are commonly referred to as neutralizing antibodies (NA). In response, a population of virus often contains or produces modifications to its RRP that allow escape from NA recognition. However, the modifications to the RRP are limited by the fact that the modified RRP must still recognize the cellular receptor for virus attachment. If a modification results in a non-functional RRP, the virus cannot attach, and so cannot replicate or survive.

### BRIEF SUMMARY OF THE DISCLOSURE

[0005] The disclosure relates to a three-dimensional arrangement of amino acid residues present in the GP5 protein of porcine reproductive and respiratory syndrome (PRRS) virus, or PRRSV. The arrangement of residues, or polypeptide domain, is present at the N-terminal portion of the GP5 protein, and has been referred to as the ectodomain of the GP5 protein. The disclosure includes use of the domain in the context of a peptide, a polypeptide, a viral particle, or other protein containing composition. In some embodiments, the domain may be present in the form of a recombinant or fusion, peptide or polypeptide. In other embodiments, the domain may be present in, or with, a recombinant viral particle or virus. In further embodiments, a nucleic acid molecule encoding a peptide or polypeptide containing the domain may be used to express the domain for the practice of the disclosure.

[0006] The disclosure is based in part on the unexpected discovery that ectodomains that vary in sequence within a previously unappreciated, HV-2 hypervariable region, may be selected for use in the preparation and use of materials to generate an immune response, including a protective response, in an animal against PRRSV. In some cases, at least two PRRSV isolates, each containing a different GP5 protein due to at least one sequence difference within the HV-2 region, are prepared and used to generate an immune response. In other cases, at least three or four PRRSV isolates, each containing a different GP5 protein due to sequence differences at least within the HV-2 region, are prepared and used to produce a protective response.

[0007] The disclosure includes the recognition that following a putative signal sequence, the GP5 ectodomain may be viewed as a combination of three regions that precede a putative transmembrane region (or membrane spanning domain or MSD). In sequential order from the N-terminus to the C-terminus of the GP5 protein, the regions are the HV-1 hypervariable region (“HV1”), the conserved region (“CR”), and the HV-2 hypervariable region (“HV2”), which is then followed by a putative transmembrane region (“TR” or MSD). FIG. 1 provides a non-limiting example. Because of the identification of the HV2 as important to the generation of an immune response against PRRSV, the disclosure includes combinations of at least two GP5 ectodomains where they differ in the sequence of the HV2. In some cases, the at least two ectodomains may be present in at least two PRRSV isolates, which may be administered to produce an immune response as described herein.

[0008] So in a first aspect, the disclosure includes a combination of at least a first polypeptide domain and a second polypeptide domain, where each domain contains a conserved GP5 motif covalently linked to an HV2 and each domain is antigenic in an animal subject to PRRSV infection. In many embodiments, the linkage is a peptide bond, or amide linkage between amino acid residues in a polypeptide. The GP5 motif and HV2 may be contiguous such that the HV2 follows immediately after the motif in the same polypeptide molecule. In other embodiments, the motif and HV2 may be separated by a linker, such as one or more amino acid residues. In further embodiments, the motif and HV2 may be joined via a chemical linkage other than a peptide bond.

[0009] This aspect of the disclosure includes alternative embodiments of the first and second polypeptide domains wherein at least one of the domains is an expanded domain that further contains an HV1 covalently linked to the conserved GP5 motif. This results in at least one domain containing at least three regions: the HV1, the conserved region (CR) containing the conserved GP5 motif, and the HV2, in sequential order. Of course embodiments of the disclosure include combinations of two, or more than two domains, such as three or four domains, where at least two of the domains are expanded domains as described herein. In some cases, each of the domains in a combination is an expanded domain.

[0010] In some embodiments, a combination of at least two polypeptide domains is a combination of at least two PRRSV isolates, each of which contains at least one of the domains. In many cases, each of the domains is an expanded domain containing the HV1, the CR, and the HV2, where each domain is different because of at least one sequence difference within the HV2. Of course the domains may optionally contain other sequence differences, such as one or more differences in the HV1.

[0011] A combination of domains may be present in a combination of GP5 polypeptides, each of which is present on a PRRSV isolate. Thus the disclosure includes a combination of two or more isolates, each containing a GP5 protein with an expanded polypeptide domain containing a different HV2 sequence as described herein. For example, and in a non-limiting combination of four isolates, a first polypeptide domain is present in a first isolate, a second polypeptide domain is present in a second isolate, a third polypeptide domain is in a third isolate, and a fourth polypeptide domain is present in a fourth isolate. Each of the isolates would differ from the others at least due to a different HV2 sequence in a GP5 protein of the isolate. Of course other sequence differences, such as one or more differences in the HV1, may also be present in the isolates.

[0012] In polypeptide based embodiments beyond GP5 protein, the first and second polypeptide domains may be located on the same molecule or on two separate polypeptide molecules. The first and second domains each contain a conserved GP5 motif, represented by the amino acid sequence C(E/S)LNG(T/A), SEQ ID NO: 1. Embodiments of the disclosure include combinations wherein the conserved GP5 motif in each of the two domains is identical. Alternatively, the first and second domains may differ in sequence, and so structure, via the limited variability (four possible sequences) within the conserved motif as indicated by SEQ ID NO: 1.

[0013] As described herein, each of the domains in a combination includes an HV2, the sequence of which differs among each of the domains. In cases of an expanded domain, the HV1 sequence may optionally also differ between each of the domains. This is based in part upon the non-limiting view that an expanded domain containing the HV 1, the CR, and the HV2 forms a recognition “pocket” which should differ among the different domains of a combination to provide increased diversity when the combination is used to produce an immune response. So by way of a non-limiting example, a sequence difference in the HV2 may result in an alteration in “pocket” structure while sequence changes in both the HV2 and the HV1 may result in a different alteration to the “pocket” structure. And while some embodiments of the disclosure include sequence changes only in the HV2 and the HV1, other embodiments may include sequence changes in the CR.

[0014] In many embodiments, the HV2 contains about 8 amino acid residues and/or a conserved portion represented by the tripeptide sequence X₀WL, where X₀ is one of the 20 naturally occurring amino acid residues. This tripeptide sequence may be located at the beginning, or N-terminal end, of the HV2. In some embodiments, the conserved tripeptide sequence comprises the sequence DWL, wherein X₀ is aspartic acid (D). In other embodiments, X₀ is asparagine (N) or any other amino acid residue except aspartic acid (D). In further embodiments X₀ is an acidic amino acid residue, such as glutamic acid (E) or glutamine (Q); a basic amino acid residue, such as arginine (R), lysine (K), or histidine (H); an amino acid residue with an aliphatic sidechain, such as alanine (A) or isoleucine (I) or glycine (G) or leucine (L) or valine (V); an amino acid residue with a hydroxyl containing sidechain, such as threonine (T) or serine (S); or an amino acid residue with an aromatic sidechain, such as tyrosine (Y).

[0015] In a second aspect, the disclosure is based upon the antigenicity and/or immunogenicity of the conserved GP5 motif and HV2 in each of the domains in a combination of two or more domains. In some embodiments, the presence of a conserved GP5 motif and an HV2, and optionally an HV1 to form a recognition “pocket”, in each of at least two domains produces antigenic and/or immunogenic, and so the disclosure includes antigenic and immunogenic compositions containing the domains. In additional embodiments, each of the domains is present in a separate polypeptide molecule that is bound or associated with a cell membrane or other lipid bilayer. In some cases, the polypeptide molecule contains a TR, such as a GP5 transmembrane domain, which facilitates association with a membrane or lipid bilayer. In some embodiments, the membrane may be a cell-free membrane or a fragment or portion of a cellular membrane, such as an envelope or coat surrounding a viral particle produced by a cell.

[0016] Further compositions include two or more polypeptide molecules that are membrane bound, or membrane associated, such as to a single viral particle or to separate viral particles. The viral particle(s) may be infectious or non-infectious, and independently, it may be replication competent or incompetent. A viral particle may be a PRRSV particle or that of another virus such as a recombinant viral particle that contains the polypeptide molecules. Non-limiting examples of recombinant viral particles that may be used to express a polypeptide of the disclosure include porcine adenovirus and poxvirus.

[0017] A viral particle that is both infectious and replication competent may be referred to as a virion. So in some embodiments, the composition may contain two or more polypeptide molecules that are membrane bound, or membrane associated, such as to a single virion or to separate virions. In embodiments of compositions containing two or more virions, such as two or more PRRSV particles, one or more may be a naturally occurring PRRSV particle or isolate that contains a first or second polypeptide domain as described herein. In some cases, more than one, up to all, of the particles are naturally occurring isolates.

[0018] Of course additional embodiments of the disclosure include combinations of more than two polypeptide domains or viral particles, each of which contains a conserved GP5 motif and an HV2, optionally with an HV1, as described herein. So compositions comprising additional polypeptide domains beyond a first and second polypeptide domain are expressly within the scope of the disclosure. Of course in such embodiments, the HV2, and optionally the HV1, in each polypeptide domain of a combination differs in sequence, and so structure, from the HV2, and optionally the HV1, in each of the other domains in the combination.

[0019] In a further aspect, the disclosure includes a method of preparing a composition described herein. In some embodiments, a method may comprise identifying or selecting at least a first polypeptide domain and a second polypeptide domain, each domain as described herein, and combining the domains to form a composition. In many cases, a method may comprise identifying or selecting at least a first polypeptide molecule containing the first domain and a second polypeptide molecule containing the second domain, and combining the polypeptides to form a composition. In some cases, the combining may comprise addition of one or more pharmaceutically acceptable excipients and/or carriers in forming a composition.

[0020] In other embodiments, the identifying or selecting may be among PRRSV isolates based upon the sequence of the HV2 in each isolate. In some cases, the identification or selection may be by detection of the HV2 sequence along with one or more other portions of the GP5 molecule, such as the conserved motif or the HV1. One non-limiting example of a detection method includes use of an antibody that recognizes a given HV2 sequence, optionally in combination with, or in the context of, another portion of the GP5 molecule. Other non-limiting detection methods include amino acid sequencing of the HV2 or nucleic acid sequencing of the sequence encoding the HV2.

[0021] In some embodiments, the detection may be of PRRSV in a sample of a biological fluid from an animal subject, such as an individual infected with PRRSV. The method may comprise contacting the sample, or a diluted form thereof, with a binding agent which binds at least a portion of the HV2 in a GP5 protein. The sample may be from a porcine subject, but any subject infected by PRRSV, or a PRRSV carrier, may be used. The biological fluid may be any fluid in which GP5 protein and/or PRRSV particles may be detectably present. Non-limiting examples include the bodily secretions of a subject, such as saliva, tears, mucous, nasal discharge, and vaginal secretions as well as other bodily fluids such as blood, serum, plasma, semen, seminal fluid, and urine as well as any fluid component of feces or a fluid extract of feces.

[0022] In further embodiments, the identification, selection, or detection may be of, or for, a novel PRRSV isolate that does not have an HV2 with a sequence as disclosed herein. A novel isolate may be advantageously used in a combination of the disclosure, such as with one, two, three, four, or more domain containing PRRSV isolates disclosed herein. A combination with a novel isolate would be expected to be advantageous because it would have a higher likelihood of producing an antibody or immune response which is novel when compared to the response to a combination lacking the novel isolate.

[0023] As indicated above, an additional aspect of the disclosure is a method of producing an antibody response (humoral immune response) or an immune response. In some embodiments, a method may comprise administering a combination of polypeptide domains, as described herein, to an animal subject with an immune system capable of producing the response. While a given response may be viewed as including a response directed to the domains or to polypeptides containing the domains, the disclosure includes generation of a response that also recognizes GP5 in one or more PRRSV isolates. In some embodiments, the antibody response includes the production of one or more neutralizing antibodies. In other embodiments, the immune response includes the production of one or more cellular immune responses, such as a T cell mediated response. In some cases, the antibody response or immune response is a protective response against a PRRSV particle, such as one expressing a GP5 protein containing a polypeptide domain of the disclosure.

[0024] In some cases, the antibody response or immune response is against at least two varieties, or strains, of PRRSV that differ in the HV2, such as those likely to be present within a particular geographic region. So embodiments of the disclosure include a response against one or more varieties of a Lelystad isolate prevalent in Europe, one or more varieties of a North American or Korean serotype of PRRSV, or one or more varieties of PRRSV found in Asia or South America.

[0025] In additional embodiments, a method of producing an antibody or immune response in a subject may comprise identifying or selecting, as described herein, at least a first polypeptide domain and a second polypeptide domain, followed by administering the selected domains to a subject to produce the antibody or immune response. In some embodiments, the identifying or selecting may be of at least a first polypeptide comprising the first polypeptide domain and a second polypeptide comprising the second polypeptide domain, followed by administering the selected polypeptides to the subject. In many cases, at least one of the first and second polypeptides may be present in a PRRSV isolate. In some cases, each of the polypeptides is present in a PRRSV isolate.

[0026] In alternative embodiments, the identifying or selecting may be of at least a first PRRSV isolate comprising the first polypeptide domain and a second PRRSV isolate comprising the second polypeptide domain, followed by administering the selected isolates to the subject. In some embodiments, the identifying or selecting is of at least three or at least four, or more, isolates. In many cases, the selecting is based upon the HV2 sequence in a GP5 protein of the PRRSV isolate. The identification or selection based upon the HV2 sequence may be performed by any suitable method, including, but not limited to, amino acid sequence analysis of the HV2, PCR-based or antibody-based detection of the HV2; or knowledge of the HV2 sequence in a previously characterized PRRSV isolate.

[0027] The details of one or more embodiments of the disclosure are set forth in the accompanying drawings and the description below. Other features, objects, and advantages of the disclosure will be apparent from the drawings and detailed description, and from the claims.

### BRIEF DESCRIPTION OF THE DRAWINGS

[0028] FIG. 1 shows a comparison of the amino acid sequences of a representative American type PRRSV strain (VR-2332) and a European type PRRSV strain (Lelystad strain, LV). The putative signal sequences of each are identified along with the HV 1, “Conserved Region” or CR (containing the conserved GP5 motif), and the HV2 (underlined). A representative, and non-limiting starting position for the HV1 is also indicated.

[0029] FIG. 2 is a schematic representation of groups of PRRSV isolates as disclosed herein.

[0030] FIG. 3 shows an alignment of a portion of the GP5 ectodomain sequence, including the conserved GP5 motif and the HV2, from publicly accessible PRRSV sequences. The NCBI (National Center for Biotechnology Information) accession numbers corresponding to the sequences are indicated along with isolates. The isolates include both North American and European strains as well as other types.

[0031] FIG. 4 illustrates GP5 protein mediated interactions between PRRSV and a host pig cell.

[0032] FIG. 5 is a Kyte-Doolittle hydrophobicity plot of the amino acid sequence of GP5 protein. The indicated numbering is from an American isolate. There is a rapid shift to hydrophobic residues at about amino acid residue 62, corresponding to the start of a putative transmembrane region.

[0033] FIG. 6 provides the GenBank accession and GI numbers for representative PRRSV GP5 protein coding sequences.

### DEFINITIONS

[0034] As used herein, the terms porcine reproductive and respiratory syndrome (PRRS) virus, or PRRSV, refer to a virus which has been reported to cause PRRS; Mystery Swine Disease (MSD); Swine Infertility and Respiratory Syndrome (SIRS), which was previously known as “blue-eared syndrome”; porcine epidemic abortion and respiratory syndrome (PEARS); Wabash syndrome; mystery pig disease (MPD); swine plague; blue abortion disease or blue ear disease in the United Kingdom; abortus blau in the Netherlands; seuchenhafter spatabort der schweine in Germany; and Heko-Heko disease (Shimizu et al., 1994). Additional alternative names of the virally caused condition include Blue ear disease, Blue-eared pig disease, Enfermedad misteriosa del cerdo, Epidemisch spätabort der sauen, Lane r bing (Chinese), Maladie blue du porc, Maladie mystérieuse du porc, Mystery pig disease, New pig disease, Plague of 1988-1989, Rätselhafte schweinekrankheit, Síndrome disgenésico y respiratorio del cerdo, Síndrome misterioso del cerdo, Syndrom reproductive et respiratoire du porc, Syndrome dysgénésique et respiratoire du porc, and Syndrome HAAT (Hyperthermie-Anorexie-Avortement de la Truie).

[0035] The terms “GP5 protein” and “major envelope glycoprotein” of PRRSV as used herein refer to the polypeptide encoded by ORF5 of a PRRSV genome as understood in the art. Representative, and non-limiting, GP5 sequences coding sequences include those identified by the accession and GI numbers provided in FIG. 6. Without being bound by theory, and offered to improve the understanding of the disclosure, GP5 protein encoded by ORF5 of the PRRSV genome is believed to be a receptor recognition protein (RRP) in PRRSV. The ectodomain of GP5 protein starts from about amino acid N30 to about D61 for the American strain and from about D33 to G63 for European strains (see FIG. 1). The typical differences between American-type strains and European strains are (1) the total amino acids for GP5 proteins are 200 and 201, respectively, (2) European strains have a longer signal sequence compared to American strains, and (3) European strains show less variations compared to American strains. The disclosure is based in part upon the analysis, and identification of the HV2 in each, of approximately 1740 GP5 sequences and their respective ectodomains. Representative sequences are shown in FIG. 3. While the disclosure may be practiced with the use of those representative sequences, the disclosure is not limited to them.

[0036] The term “HV-1 region” or “HV 1” refers to a polypeptide sequence present at the N-terminal end of the conserved region of GP5 as described herein. The region is optionally present in a polypeptide domain of the disclosure. But when present, the sequence may be up to about 14 or more amino acid residues in length, with lengths of 11, 12, 13 and 14 being specifically contemplated. In other embodiments, lengths of about 11, about 9, about 7, about 5, or about 3 or fewer residues may also be used. The disclosure includes embodiments wherein this region varies considerably in sequence. Non-limiting examples of HV1 sequences include those present in FIG. 3.

[0037] Amino acid residues in the disclosed sequences may be conservatively substituted, or replaced, by another residue with similar characteristics and properties. As used herein, conservative amino acid substitutions of the disclosure are shown in Table 1 below.

TABLE 1

| Definition | Amino Acid | Symbol |
|---|---|---|
| Amino Acids with Aliphatic | Glycine | Gly—G |
| R-Groups | Alanine | Ala—A |
| | Valine | Val—V |
| | Leucine | Leu—L |
| | Isoleucine | Ile—I |
| Amino Acids with Hydroxyl | Serine | Ser—S |
| R-Groups | Threonine | Thr—T |
| Amino Acids with Sulfur- | Cysteine | Cys—C |
| Containing R-Groups | Methionine | Met—M |
| Acidic Amino Acids | Aspartic Acid | Asp—D |
| | Asparagine | Asn—N |
| | Glutamic Acid | Glu—E |
| | Glutamine | Gln—Q |
| Basic Amino Acids | Arginine | Arg—R |
| | Lysine | Lys—K |
| | Histidine | His—H |
| Amino Acids with Aromatic | Phenylalanine | Phe—F |
| Rings | Tyrosine | Tyr—Y |
| | Tryptophan | Trp—W |
| Imino Acids | Proline | Pro—P |

### DETAILED DESCRIPTION OF MODES OF PRACTICING THE DISCLOSURE

[0038] General

[0039] The disclosure is based in part on an analysis of current PRRSV genetic information, such as the DNA sequences of the GP5 protein. Sequences of PRRSV isolated from pigs showing clinical PRRS symptoms were also analyzed. The analysis led to the identification of two hyper variable regions, HV-1 and HV-2, where the HV-2 region begins with either an X₀WL tripeptide motif wherein X₀ is one of the 20 naturally occurring amino acid residues as described herein. The analysis also led to the identification of a conserved region in positions 142 to T53 in an American strain, and positions 144 to T55 in a European strain (see FIG. 1).

[0040] Existence of a conserved region in the ectodomains among American strains and European strains of PRRSV indicates that the conserved region participates in direct contact between GP5 protein, as a receptor recognition protein, and a receptor on a host cell to be infected by PRRSV. Based on this idea, and without being bound by theory, the two HV regions on either side of the conserved region are believed to serve as “gates” (or structural motifs) that maintain the hydrophobic properties of the conserved region. Previous commentaries on the HV-1 region and the conserved region did not advance the studies of GP5 protein immunogenicity because there were too many variations in the HV-1 area. But in light of the hypervariability in HV-2, it was illogical to expect that HV-2 would participate in interactions between GP5 and a host cell receptor.

[0041] The instant disclosure is also based in part on the recognition that variations in the HV-1 region may be considered in combination with HV-2 sequences that display less variation. Therefore, the instant disclosure includes (1) sorting PRRSV isolates based upon HV2 sequence variations to group them based upon immunological similarities; and (2) selecting combinations of PRRSV strains in different groups to make broad spectrum vaccines that provide broader, heterologous protection upon administration. The sorting and selection may optionally include consideration of the HV-1 region. Additionally, the isolates are optionally first attenuated or inactivated prior to their administration as a vaccine or immunogenic composition. Non-limiting examples of attenuation include methods known to the skilled person, such as serial passage in culture, such as in cells or tissue, or passage in animals. Of course the passaging may be conducted in vitro. Non-limiting examples of inactivation include those known to the skilled person, such as heating, irradiation, chemical inactivation treatments.

[0042] The disclosure includes the optional division of all American strains into two groups based on amino acid position 61. More than 85% of American-type isolates have been reported to include D (Asp) or S (Ser) at position 61. The exceptions (less than 15%) usually have amino acid residues at position 61 other than C (Cys), F (Phe), M (Met), W (Trp), and P (Pro). Therefore, the disclosure includes embodiments wherein the first HV2 residue, corresponding to position 61, is an amino acid residue other than C, F, M, W, and P. In some embodiments, that residue is selected from A (Ala), G (Gly), V (Val), L (Leu), I (Ile), S (Ser), T (Thr), N (Asn), E (Glu), Q (Gln), R (Arg), K (Lys), H (His), or Y (Tyr). In alternative embodiments, however, that residue is selected from C, F, M, W, or P.

[0043] The disclosure includes the optional classification into two groups for American strains; Group D and Group S, with eight sub-groups each (D-1 through D-8 and S-1 through S-8, respectively) based on observed sequence information. The disclosure further includes division of all European strains into eight (8) subgroups (E-1 through E-8) based on observed sequence information. These groupings are illustrated in FIG. 2.

[0044] The groups and subgroups are the basis for some embodiments of the disclosure, where a combination of at least a first and second polypeptide domain (each containing a conserved GP5 motif covalently linked to an HV2 as described herein) from different groups or subgroups, may be selected and used to produce a composition or vaccine that produces a broader antibody or immune response than with use of the polypeptide domains separately (or individually). In some embodiments, a combination of two to four, or more, polypeptide domains is used in the practice of the disclosure. In further embodiments, the use of a domain from one group or subgroup may result in the production of an antibody or immune response against more than one domain from the same group or subgroup.

[0045] Non-limiting examples of the disclosure include combinations of at least four domains, wherein each of the four is selected, without duplication, from one of the 24 subgroups described herein as D-1 through D-8, S-1 through S-8, and E-1 through E-8. A rough approximation of the number of possible combinations is provided by the mathematical formula (24×23×22×21)/(4×3×2×1), or about 10,600. But in some embodiments, the number of possible combinations are reduced significantly where each combination contains at least one domain from each of the Group D and Group S subgroups as well as one from E-1 through E-8. A rough approximation of such an example is provided by the formula (8×8×8×21)/(4×3×2×1), or about 448. In other embodiments where only Group D and Group S subgroups are used, the number of possible combinations is also reduced. Similarly, embodiments where four domains from E-1 through E-8 are used, the number of possible combinations are further reduced.

[0046] More generally, a composition or vaccine of the disclosure may include at least one polypeptide domain from each of the D and S groups as described herein. So a combination of two domains may have one from each of the D and S groups. In other embodiments, a composition or vaccine may include any combination of a D subgroup domain and/or any combination of an S subgroup domain. So a combination of two domains may have both from Group D or both from Group S or one from each group. In many embodiments, the polypeptide domains used in a combination is present in the GP5 protein of a PRRSV isolate that is used as a composition or vaccine of the disclosure. Therefore, the disclosure also includes identification and classification of PRRSV isolates into the same groups and subgroups described herein based upon the HV-2 sequence in the GP5 protein. The classified isolates may then be selected as disclosed.

[0047] As additional non-limiting examples, a composition or vaccine of the disclosure may contain an isolate or domain from the D-1 subgroup and at least one or more (such as two or three or more) isolates or domains from any other D subgroup or any S or E subgroup;
[0048] an isolate or domain from the D-2 subgroup and at least one or more (such as two or three or more) isolates or domains from any other D subgroup or any S or E subgroup;
[0049] an isolate or domain from the D-3 subgroup and at least one or more (such as two or three or more) isolates or domains from any other D subgroup or any S or E subgroup;
[0050] an isolate or domain from the D-4 subgroup and at least one or more (such as two or three or more) isolates or domains from any other D subgroup or any S or E subgroup;
[0051] an isolate or domain from the D-5 subgroup and an at least one or more (such as two or three or more) isolates or domains from any other D subgroup or any S or E subgroup;
[0052] an isolate or domain from the D-6 subgroup and at least one or more (such as two or three or more) isolates or domains from any other D subgroup or any S or E subgroup;
[0053] an isolate or domain from the D-7 subgroup and at least one or more (such as two or three or more) isolates or domains from any other D subgroup or any S or E subgroup; or
[0054] an isolate or domain from the D-8 subgroup and at least one or more (such as two or three or more) isolates or domains from any other D subgroup or any S or E subgroup.

[0055] Alternatively, a composition or vaccine of the disclosure may contain
[0056] an isolate or domain from the S-1 subgroup and at least one or more (such as two or three or more) isolates or domains from any other S subgroup or any D or E subgroup;
[0057] an isolate or domain from the S-2 subgroup and at least one or more (such as two or three or more) isolates or domains from any other S subgroup or any D or E subgroup;
[0058] an isolate or domain from the S-3 subgroup and at least one or more (such as two or three or more) isolates or domains from any other S subgroup or any D or E subgroup;
[0059] an isolate or domain from the S-4 subgroup and at least one or more (such as two or three or more) isolates or domains from any other S subgroup or any D or E subgroup;
[0060] an isolate or domain from the S-5 subgroup and at least one or more (such as two or three or more) isolates or domains from any other S subgroup or any D or E subgroup;
[0061] an isolate or domain from the S-6 subgroup and at least one or more (such as two or three or more) isolates or domains from any other S subgroup or any D or E subgroup;
[0062] an isolate or domain from the S-7 subgroup and at least one or more (such as two or three or more) isolates or domains from any other S subgroup or any D or E subgroup; or
[0063] an isolate or domain from the S-8 subgroup and at least one or more (such as two or three or more) isolates or domains from any other S subgroup or any D or E subgroup.

[0064] Similarly, embodiments of the disclosure include a composition or vaccine of the disclosure may contain an isolate or domain from the E-1 subgroup and at least one or more (such as two or three or more) isolates or domains from any other E, D, or S subgroup;
[0065] an isolate or domain from the E-2 subgroup and at least one or more (such as two or three or more) isolates or domains from any other E, D, or S subgroup;
[0066] an isolate or domain from the E-3 subgroup and at least one or more (such as two or three or more) isolates or domains from any other E, D, or S subgroup;
[0067] an isolate or domain from the E-4 subgroup and at least one or more (such as two or three or more) isolates or domains from any other E, D, or S subgroup;
[0068] an isolate or domain from the E-5 subgroup and at least one or more (such as two or three or more) isolates or domains from any other E, D, or S subgroup;
[0069] an isolate or domain from the E-6 subgroup and at least one or more (such as two or three or more) isolates or domains from any other E, D, or S subgroup;
[0070] an isolate or domain from the E-7 subgroup and at least or more (such as two or three or more) isolates or domains from any other E, D, or S subgroup; or
[0071] an isolate or domain from the E-8 subgroup and at least one or more (such as two or three or more) isolates or domains from any other E, D, or S subgroup.

[0072] In some embodiments, however, a combination of the disclosure is not a combination of the GP5 ectodomains of VR2332 and LV as described herein. In other embodiments, a combination of the disclosure is not a combination of only GP5 ectodomains with the following sequences bridging the boundary between HV2 and the putative transmembrane region of GP5:

| | |
|---|---|
| ANKFDWAVET | (SEQ ID NO: 7) |
| ANKFDWAVEP | (SEQ ID NO: 8) |
| AGEFDWAVET | (SEQ ID NO: 9) |
| ADKFDWAVEP | (SEQ ID NO: 10) |
| ADRFDWAVEP | (SEQ ID NO: 11) |
| or | |
| SSHFGWAVET. | (SEQ ID NO: 12) |

[0073] But specifically contemplated embodiments of the invention include combinations of domains wherein both the X₀ residue in X₀WL and at least one additional residue in the HV2 sequence both differ between the domains of a combination.

[0074] As described herein, each polypeptide domain (and so each isolate) contains the conserved GP5 motif represented by the amino acid sequence C(E/S)LNG(T/A), SEQ ID NO: 1. So embodiments of the disclosure include domains wherein the GP5 motif is represented by the amino acid sequence CELNGT (SEQ ID NO:2), CELNGA (SEQ ID NO:3), CSLNGT (SEQ ID NO:4), or CSLNGA (SEQ ID NO:5). In other embodiments, the conserved GP5 motif is larger and is represented by the amino acid sequence I(Y/F)(N/D/S/K)(L/S/F/M)(T/P/M)(L/I)C(E/S)LNG(T/A), SEQ ID NO:6, which corresponds to the “Conserved Region” shown in FIG. 1.

[0075] Virus Based Compositions

[0076] The disclosure is based upon the antigenicity and/or immunogenicity of the conserved GP5 motif and HV2 in a polypeptide domain, used in combination, as described herein. Thus the disclosure includes combinations of viral isolates as described above. Non-limiting examples include combinations of the viral isolates listed in FIG. 3 (based on their sequence deposit information) as they may be classified into the groups and subgroups disclosed herein. In some embodiments, combinations of at least two or more, such as three or four or more, of those isolates are contemplated for use in the practice of the disclosure.

[0077] Additionally, the disclosure includes a combination of a viral isolate and a virus particle where each contains a polypeptide of a combination disclosed herein. In other embodiments, two or more virus particles are used. Non-limiting examples of a polypeptide domain containing virus particle of the disclosure include an infectious or non-infectious virus particle, which is independently replication competent or incompetent. Additional non-limiting examples include a virus particle cultured or passaged in vitro; an attenuated virus; and a recombinant viral particle.

[0078] In many embodiments, a viral particle is a PRRSV particle with an outer membrane that contains a GP5 protein with a polypeptide domain of the disclosure. In other embodiments, the viral particle may be non-PRRS virus with an outer membrane containing a polypeptide domain, optionally as part of a GP5 protein, as described herein. Further embodiments include a PRRSV or non-PRRSV viral particle with an outer membrane containing two or more of the disclosed polypeptide domains, such as via two or more GP5 proteins with different ectodomains as described herein. In some cases, a viral particle is a PRRSV with a genome that contains multiple copies of GP5 protein encoding ORF5 sequences. Such virus isolates have been previously reported and referred to as an “overproduction mutant” or “high-replication phenotype” PRRSV. The instant disclosure includes such a PRRSV that has been recombinantly modified to contain and express more than one GP5 protein, each containing a polypeptide domain with a different HV2 region as described herein. In other embodiments, a recombinant virus may be an insect virus, such as Baculovirus, which has been previously reported as capable of expressing PRRSV GP5 protein, a porcine adenovirus, or a poxvirus.

[0079] In further embodiments, a virus isolate or viral particle is one that is infectious and replication competent, such as a PRRSV isolate or infectious particle. In most cases, the particle contains a genome encoding and capable of expressing GP5 protein after infection in vivo to produce GP5. A particle that is both infectious and replication competent may be referred to as a virion. In alternative embodiments, a particle of the disclosure is infectious and replication incompetent, but optionally capable of intracellularly expressing GP5 proteins.

[0080] In embodiments comprising the use of a PRRSV isolate, the isolate may be identified or selected based upon the sequence of the HV2 in an isolate. In some cases, such as that of an isolate represented in FIG. 3 herein, the identification or selection may be based upon review of the sequence information or based upon knowledge of the HV2 sequence in a characterized isolate. In other cases, such as where the isolate has not been previously characterized, the selection may be by detection of the HV2 sequence, such as by use of an antibody that recognizes a given HV2 sequence; sequencing the GP5 coding sequence (ORF5) of the isolate; or purification and amino acid sequencing of the GP5 protein per se. Non-limiting examples of antibody based detection include immunoprecipitation and assays such as ELISA, RIA, and Western blotting. Non-limiting examples of sequencing include dideoxynucleotide-based sequencing of DNA molecules and PCR-based sequencing, including methods based upon reverse transcription of a GP5 encoding RNA molecule followed by PCR. In some embodiments, the selection of an isolate includes detection of the sequence of one or more portions of the GP5 protein beyond the HV2, such as the conserved motif and/or the HV1.

[0081] In many embodiments of an antibody based detection method, the antibody does not bind to the GP5 protein as found in multiple PRRSV strains and isolates. Instead, the antibody should be sufficiently specific to the HV2 such that it is capable of detecting a particular isolate based in whole or in part on the HV2 sequence or structure. In addition to the use of an antibody, such as a labeled antibody to facilitate its detection, an antibody fragment that binds the HV2 of a PRRSV GP5 protein may also be used. The antibody fragment may be the Fv or Fab region of an HV2 binding antibody; other non-limiting examples include a single chain antibody, including a single chain Fv region and a single chain Fab region. The antibodies and antibody fragments are preferably monoclonal but may be polyclonal in some cases.

[0082] In further embodiments, the detection of a PRRSV isolate is by use of a sample of a biological fluid from a porcine subject, such as an individual infected with PRRSV. The method may comprise contacting the sample, or a diluted form thereof, with a binding agent which binds the HV2 of GP5 protein, preferably to the exclusion of other molecules present in the biological fluid. In many embodiments, the subject is a pig, and the sample may be of a bodily fluid or secretion from a pig. Non-limiting examples of pigs that from which samples may be obtained for use with the present disclosure include boar, sow, fattener, and gilt. The pigs may range in age from 1 to about 30, 31 to about 40, 41 to about 50, or 51 to about 60 days or older.

[0083] Of course the biological fluid should be a fluid in which GP5 protein and/or PRRSV particles are detectably present. Non-limiting examples include bodily secretions such as saliva, tears, mucous, nasal discharge, and vaginal secretions as well as other bodily fluids such as blood, serum, plasma, semen, seminal fluid, and urine as well as any fluid component of feces or a fluid extract of feces.

[0084] Where the biological fluid contains PRRSV particles, detection may be by use of a PCR-based method to detect a GP5 protein encoding nucleic acid molecule, such as a DNA or RNA molecule containing a GP5 protein or a portion of the molecule encoding at least the HV2.

[0085] In additional embodiments, the selection and detection may be of, or for, a PRRSV isolate that has a GP5 protein with an HV2 sequence that differs from any disclosed herein or as previously characterized. Such a novel isolate may still be classifiable into one of the groups or subgroups as disclosed herein. Alternatively, such an isolate may not be classifiable into one of the disclosed groups or subgroups and so may be advantageously used as part of a disclosed combination because the novel isolate would have a higher likelihood of producing a novel antibody or immune response.

[0086] The disclosure thus includes a method of producing an antibody or immune response in a subject by use of a PRRSV isolate comprising a GP5 protein with an HV2 sequence that differs from any HV2 sequence disclosed herein. The HV2 of the isolate may thus not be any described herein or encompassed by any of the disclosed groups or subgroups. The method may comprise identifying a PRRSV isolate as comprising a GP5 polypeptide molecule containing an HV2 region distinct from any HV2 sequence of FIG. 3, or any D, S, or E subgroup, and administrating said isolate to said subject to produce an antibody or immune response in said subject. The identifying or determining of a distinct HV2 sequence may be by any means disclosed herein, including an antibody or nucleic acid based method as non-limiting examples, followed by comparison to the instant disclosure. In some embodiments, the isolate is attenuated or inactivated as described herein.

[0087] Polypeptides and Compositions

[0088] The disclosure is based upon the antigenicity and/or immunogenicity of a polypeptide domain containing the conserved GP5 motif and HV2 as described herein. The HV2 portion contributes to the antigenicity and/or immunogenicity of the domain such that the use, in combination, of polypeptide molecules containing two different domains, results in the generation of a broader antibody or immune response in comparison to use of only one of the domains. Accordingly, the disclosure includes combinations of two or more polypeptide domains, such as in a composition or vaccine, as well as their use in a method of immunizing a subject.

[0089] The nature of a polypeptide domain has been described herein. Generally, the domain contains a conserved GP5 motif covalently linked to an HV2 region. Many embodiments have a peptide bond, or amide linkage, linking the GP5 motif and the HV2 so that they are contiguous when considering the sequence from N-terminus to the C-terminus. Other embodiments include the use of a linker moiety. Non-limiting examples of a linker moiety include a short peptide sequence, such as about 1, 2, 3, 4, or 5 amino acids in length, and a non-peptide linker, such as a short chain of atoms with at least one carbon atom in the chain or other synthetic linker. In cases of a short peptide sequence, the amino acids may be any naturally occurring amino acid, such as the 20 amino acids of Table 1 herein. In some alternative embodiments, the motif and HV2 may be covalently joined via a non-peptide bond linkage, such as a carbon-carbon bond.

[0090] With the use of first and second polypeptide domains, the domains may be located on the same polypeptide molecule or two separate molecules. In many embodiments, the domains are located on separate polypeptide molecules, each of which includes a transmembrane domain or other protein domain that allows for association with a lipid bilayer. A transmembrane domain may also be present in a single polypeptide molecule contain both domains. In some embodiments, the transmembrane domain is the putative transmembrane region of a PRRSV GP5 protein as known to the skilled person and as described herein.

[0091] In many embodiments, the domains are located on separate GP5 proteins. In numerous other embodiments, the domains have identical sequences in the conserved GP5 motif, such as that represented by CELNGT (SEQ ID NO:2). But even with an identical conserved GP5 motif, the first and second polypeptide domains differ in the HV2 sequence, which accounts for the desired difference in antigenicity and/or immunogenicity between the domains.

[0092] In many embodiments of separate GP5 proteins containing the first and second polypeptide domains, each GP5 protein may comprise, from the N-terminus to the C-terminus, a putative signal sequence, an HV-1 hypervariable region, a conserved region (CR) containing the conserved GP5 motif, the HV-2 hypervariable region, a putative transmembrane region, and the remainder of the GP5 protein. In other embodiments, a GP5 protein may lack all or part of the putative signal sequence. Of course polypeptide molecules retaining the antigenic and/or immunogenic properties of the disclosed polypeptide domains, but with fewer GP5 components, may also be used. Non-limiting examples include a polypeptide molecule comprising the HV-1 hypervariable region, a conserved region (CR) containing the conserved GP5 motif, and the HV-2 hypervariable region, optionally with a transmembrane domain as described above.

[0093] Generally, a disclosed HV2 region is about 8 amino acid residues in length. In alternative embodiments, the length may be 6, 7, 8, 9, or 10 residues in length. The exact number of residues is unimportant so long as the resultant domain retains the desired antigenic and/or immunogenic activity. In some embodiments, the HV2 begins with the tripeptide sequence X₀WL where X₀ is as defined herein. So in some embodiments, the HV2 is represented by the sequence X₀WLX₁X₂X₃X₄X₅, wherein each of X₀, X₁, X₂, X₃, and X₄ is independently one of the 20 naturally occurring amino acid residues shown in Table 1, and X₅ is selected from any amino acid residue, with optional exception of C (Cys), F (Phe), M (Met), W (Trp), and P (Pro).

[0094] In other embodiments, the HV2 is a D group sequence represented by X₀WLX₁X₂X₃X₄D, wherein the aspartic acid (D) residue (at the end of X₀WLX₁X₂X₃X₄D) may be replaced by any amino acid residue except C, F, M, P, W, S, T, and Y (such as replacement by A, G, V, L, I, N, E, Q, R, K, or H) and where X₀ is as described above, and one of subgroups D-1 through D-8, which are represented by the following

[0095] D-1: wherein X₁ is an aliphatic amino acid residue, X₂ is an acidic amino acid residue (or wherein X₁ is an acidic amino acid residue and X₂ is an aliphatic amino acid residue), X₃ is a basic amino acid residue, and X₄ is an amino acid residue comprising an aromatic ring, such as phenylalanine (F);

[0096] D-2: wherein X₁ is an aliphatic amino acid residue, X₂ is Ser, Thr, Tyr or an basic amino acid residue (or wherein X₁ is Ser, Thr, Tyr or a basic amino acid residue and X₂ is an aliphatic amino acid residue), X₃ is a basic amino acid residue, and X₄ is an amino acid residue comprising an aromatic ring, such as phenylalanine (F);

[0097] D-3: wherein each of X₁ and X₂ is independently an aliphatic amino acid residue, X₃ is a basic amino acid residue, and X₄ is an amino acid residue comprising an aromatic ring, such as phenylalanine (F);

[0098] D-4: wherein X₁ is an acidic amino acid residue, X₂ is Ser, Thr, Tyr or a basic amino acid residue (or wherein X₁ is Ser, Thr, Tyr or a basic amino acid residue and X₂ is an acidic amino acid residue), X₃ is a basic amino acid residue, and X₄ is an amino acid residue comprising an aromatic ring, such as phenylalanine (F);

[0099] D-5: wherein each of X₁ and X₂ is independently an acidic amino acid residue, X₃ is a basic amino acid residue, and X₄ is an amino acid residue comprising an aromatic ring, such as phenylalanine (F);

[0100] D-6: wherein each of X₁ and X₂ is independently one of the 20 naturally occurring amino acid residues, X₃ is an acidic amino acid residue, and X₄ is an amino acid residue comprising an aromatic ring, such as phenylalanine (F);

[0101] D-7: wherein each of X₁ and X₂ is independently one of the 20 naturally occurring amino acid residues, X₃ is a non-aromatic amino acid residue with a hydroxyl containing R-group (such as Ser or Thr), and X₄ is an amino acid residue comprising an aromatic ring, such as phenylalanine (F); or

[0102] D-8: wherein each of X₁ and X₂ is independently either a basic amino acid residue or an amino acid residue comprising an aromatic ring, such as tyrosine (Y), serine (S), threonine (T), or phenylalanine (F), X₃ is a basic amino acid residue, and X₄ is an amino acid residue comprising an aromatic ring, such as phenylalanine (F).

[0103] In additional embodiments, the HV2 is an S group sequence represented by X₀WLX₁X₂X₃X₄X₅ (where X₀ is as described above) and one of subgroups S-1 through S-8, which are represented by the following

[0104] S-1: wherein X₁ is an acidic amino acid residue, X₂ is asparagine (N), X₃ is a basic amino acid residue, X₄ is an amino acid residue comprising an aromatic ring, such as phenylalanine (F), and X₅ is S;

[0105] S-2: wherein each of X₁ and X₂ is independently an acidic amino acid residue except that X₂ is not asparagine (N), X₃ is a basic amino acid residue, X₄ is an amino acid residue comprising an aromatic ring, such as phenylalanine (F), and X₅ is S;

[0106] S-3: wherein X₁ is an aliphatic amino acid residue, X₂ is an acidic amino acid residue (or wherein X₁ is an acidic amino acid residue and X₂ is an aliphatic amino acid residue), X₃ is a basic amino acid residue, X₄ is an amino acid residue comprising an aromatic ring, such as phenylalanine (F), and X₅ is S;

[0107] S-4: wherein X₁ is an aliphatic amino acid residue, X₂ is Ser, Thr, Tyr or a basic amino acid residue (or wherein X₁ is Ser, Thr, Tyr or a basic amino acid residue and X₂ is an aliphatic amino acid residue; or where each of X₁ and X₂ is independently Ser, Thr, Tyr or a basic amino acid residue; or where each of X₁ and X₂ is independently an aliphatic amino acid residue), X₃ is a basic amino acid residue, X₄ is an amino acid residue comprising an aromatic ring, such as phenylalanine (F), and X₅ is S;

[0108] S-5: wherein X₁ is an acidic amino acid residue, X₂ is Ser, Thr, Tyr or a basic amino acid residue (or wherein X₁ Ser, Thr, Tyr or is a basic amino acid residue and X₂ is an acidic amino acid residue except N (Asn)), X₃ is a basic amino acid residue, X₄ is an amino acid residue comprising an aromatic ring, such as phenylalanine (F), and X₅ is S;

[0109] S-6: wherein X₁ is a basic amino acid residue, X₂ is an asparagine (N), X₃ is a basic amino acid residue, X₄ is an amino acid residue comprising an aromatic ring, such as phenylalanine (F), and X₅ is S;

[0110] S-7: wherein each of X₁ and X₂ is independently one of the 20 naturally occurring amino acid residues, X₃ is a basic amino acid residue, X₄ is an amino acid residue comprising an aromatic ring, such as phenylalanine (F), and X₅ is T or Y; or

[0111] S-8: wherein X₁ is an acidic amino acid residue, X₂ is an acidic amino acid residue (or wherein X₁ is an acidic amino acid residue and X₂ is an aliphatic amino acid residue, or alternatively wherein X₁ is an aliphatic amino acid residue and X₂ is an acidic amino acid residue), X₃ is an acidic amino acid residue, X₄ is an amino acid residue comprising an aromatic ring, such as phenylalanine (F), and X₅ is S.

[0112] In yet additional embodiments, the HV2 is an E group sequence represented by one of subgroups E-1 through E-8 as follows:

[0113] the sequence NWLSX₂X₃X₄X₅ (represented by E-1), wherein each of X₂, X₃, and X₄ is independently one of the 20 naturally occurring amino acids, and X₅ is an acidic or aliphatic amino acid residue;

[0114] the sequence X₀WLX₁X₂X₃X₄X₅ (represented by E-2), wherein X₀ is an acidic amino acid residue except for asparagine (N), each of X₁, X₂, X₃, and X₄ is independently one of the 20 naturally occurring amino acid residues, and X₅ is an acidic or aliphatic amino acid residue;

[0115] the sequence X₀WLX₁X₂X₃X₄X₅ (represented by E-3), wherein X₀ is a basic amino acid residue, each of X₁, X₂, X₃, and X₄ is independently one of the 20 naturally occurring amino acid residues, and X₅ is an acidic or aliphatic amino acid residue;

[0116] the sequence X₀WLX₁X₂X₃X₄X₅ (represented by E-4), wherein X₀ is any non-acidic and non-basic amino acid residue, each of X₁, X₂, X₃, and X₄ is independently one of the 20 naturally occurring amino acid residues, and X₅ is an acidic or aliphatic amino acid residue;

[0117] the sequence NWLSX₂X₃X₄X₅ (represented by E-5), wherein each of X₂, X₃ and X₄ is independently one of the 20 naturally occurring amino acid residues, and X₅ is Serine (S) or Threonine (T);

[0118] the sequence X₀WLX₁NX₃X₄X₅ (represented by E-6), wherein X₀ is any amino acid residue except asparagine (N), each of X₁, X₃, and X₄ is independently one of the 20 naturally occurring amino acid residues, and X₅ is Serine (S) or Threonine (T);

[0119] the sequence X₀WLX₁X₂X₃X₄X₅ (represented by E-7), wherein X₀ is an acidic amino acid residue except asparagine (N), each of X₁, X₂, X₃, and X₄ is independently one of the 20 naturally occurring amino acid residues except that X₂ is not asparagine (N), and X₅ is any non-acidic amino acid residue; or

[0120] the sequence X₀WLX₁X₂X₃X₄X₅ (represented by E-8), wherein X₀ is any non-acid amino acid residue, each of X₁, X₂, X₃, and X₄ is independently one of the 20 naturally occurring amino acid residues, and X₅ is any non-acidic amino acid residue.

[0121] The term “non-acidic” refers to an amino acid residue other than an acidic amino acid; and the term “non-basic” refers to an amino acid residue other than a basic amino acid.

[0122] In embodiments of separate polypeptide molecules containing the first and second polypeptide domains, the polypeptide molecules may be administered together or separately in the methods disclosed herein. When administered together, they may be formulated as a composition. Optionally, the composition comprises one or more acceptable carriers or excipients or adjuvants as desired by the skilled person.

[0123] Methods of Preparation

[0124] The disclosure includes a method of preparing polypeptide domains and polypeptide molecules as described herein. In some embodiments, a peptide or short polypeptide may be prepared by use of de novo synthesis, such as by automated chemical methods known to the skilled person. Alternatively, the preparation may be by use of recombinant DNA methods based upon the availability of nucleic acid molecules encoding the polypeptide domains and polypeptide molecules of the disclosure. The sequences of the nucleic acid molecules may be modified by known techniques, such as, but not limited to, PCR-based mutagenesis and de novo synthesis of nucleic acid molecules, such as by automated chemical methods known to the skilled person.

[0125] A method based upon the use of recombinant DNA techniques may be used to produce a disclosed polypeptide. Such a method may comprise expressing a nucleic acid molecule in a suitable expression system, such as an in vitro cell culture system or in a producer animal, and isolating the expressed polypeptide from the expression system. The expression system may comprise a nucleic acid sequence encoding a disclosed polypeptide and operably linked to a suitable regulatory or promoter sequence. Non-limiting examples of a suitable cell or cell line include porcine alveolar macrophages, CRL 11171, MA-104, MARC-145, PSP-36, and PSP-36-SAH. A non-limiting example of a producer animal is a pig, such as a boar, sow, fattener, or gilt.

[0126] After producing a disclosed polypeptide domain, the method may comprise selecting and/or combining it as a first polypeptide domain with a second polypeptide domain as described herein to form a composition. The combining may comprise adding one or more acceptable carriers, excipients and/or adjuvants to form a composition.

[0127] In some embodiments, such as with a PRRSV based nucleic acid molecule, the expression system produces viral particles that incorporate a disclosed polypeptide within the particle's outer membrane. The PRRSV based nucleic acid molecule may be a viral genome that has been modified to express a GP5 protein containing an HV2 region as disclosed herein. In further embodiments, the nucleic acid molecule contains more than one copy of a GP5 protein encoding sequence, where each copy encodes a different HV2 region as described herein. In other embodiments, the expression system is cell-free, such as in the case of a rabbit reticulocyte system.

[0128] Other methods of producing PRRSV particles are also provided. In some embodiments, the production comprises selection and/or isolation of PRRSV isolates as described herein. The selection and/or isolation may comprise culturing or passaging an isolate as known to the skilled person or as described herein. In alternative embodiments, the selection may be of an isolate from an infected subject, such as a pig, and further comprise obtaining infectious fluid and/or tissue from the subject for use as a source of an HV2 region as described herein. Non-limiting examples of an infectious fluid and/or tissue include blood, serum, plasma, nasal secretion, semen, seminal fluid, and urine as well as lung tissue, tonsil tissue, lymph node tissue, a fluid component of feces or a fluid extract of feces. In some embodiments, the infectious fluid and/or tissue may be used as part of a disclosed combination. Non-limiting examples include use of a fluid or tissue as an inoculum in combination with a second HV2 region, optionally in a polypeptide molecule or a viral particle as described herein.

[0129] Methods of Use

[0130] The disclosure includes a method of generating an antibody or immune response in a subject via administration of a disclosed combination of first and second polypeptide domains. In some embodiments, the method comprises administration of a disclosed composition in an amount effective to produce an antibody and/or immune response. In many cases, the administered amount is effective to produce a protected state in a treated subject against a subsequent challenge by one or more PRRSV isolates, such as infection by PRRSV. In some cases, a method may further comprise an additional administration of a disclosed composition as a “booster”. Non-limiting examples of the subject include a sow, a gilt, a pregnant sow, or a pregnant gilt. In some embodiments, the subject is a pig from about 1 to 12 weeks in age, such as about 2, about 3, about 4, about 5, about 6, about 7, about 8, about 9, about 10, or about 11 weeks. In other embodiments, the pig is from about 12 to about 56 weeks or older in age, such as about 14, about 16, about 18, about 20, about 22, about 24, about 26, about 28, about 30, about 32, about 34, about 36, about 38, about 40, about 42, about 44, about 46, about 48, about 50, about 52, or about 54 weeks. In additional embodiments, the pig has been weaned and/or has passed the stage at which maternal antibodies provide adequate protection.

[0131] An effective amount of a disclosed combination or composition, as a vaccine, to produce a protected state in a subject, such as a pig, may also be determined by administration of the vaccine to an unaffected pig, followed by challenge with PRRSV isolate. In some cases, the isolate may be purified or isolated in that its virus particles have the same genome or the same GP5 protein or the same GP5 ectodomain. Non-limiting examples of isolates for use in a challenge include those listed in FIG. 3 as well as an infectious bodily fluid or tissue from an animal infected with the isolate. In some embodiments, the challenge may be after about 3 to about 8 weeks after a booster vaccination, and may be with a large or excess amount of PRRSV.

[0132] The vaccine or amount thereof is effective if it reduces the severity of any symptoms of PRRSV infection and/or any gross or histopathological change when compared to the results of challenging a non-vaccinated (untreated with the vaccine) pig with the same isolate. Of course the pig should be PRRSV-free, such as a pig that has not been previously exposed to the virus or which has been exposed but symptom-free for a sufficient period of time to identify it as uninfected. Alternatively, the pig may be identified as uninfected by use of an assay to detect the presence of PRRSV or anti-PRRSV antibody in a bodily fluid or tissue sample from the pig.

[0133] Non-limiting examples of symptoms of PRRSV infection include fever, respiratory distress, cyanosis, pneumonia, lethargy, sneezing, coughing, eye edema, blue ears, and heart and/or brain lesions. Additionally, the presence of the isolate used in the challenge may be determined by other quantitative or qualitative methods. Non-limiting examples include detection of lung lesions, or virus in a blood or serum sample, in a challenged pig, with or without vaccination, after about 2 days to about 2 weeks. A decrease in lesions in a vaccinated pig, in comparison to an untreated pig, provides a quantitative means to detect infection. Alternatively, detection of virus in the blood or serum of a vaccinated pig indicates that the vaccination may not have been effective while a negative detection of virus indicates that the vaccination may have been effective.

[0134] The effective stimulation of immunoprotection in a subject may be mediated by the generation of an antibody and/or immune response after exposure to a combination or composition of the disclosure. Non-limiting examples of the subject may be a pig that has not been previously exposed to PRRSV or a pig that has been exposed to PRRSV or suffering the effects from PRRSV infection. In many embodiments, the production of an antibody response includes the production of neutralizing antibodies against the GP5 protein, including all or part of the HV2 therein. Confirmation of the generation of such antibodies may be performed by assaying blood or serum from a treated animal for the presence of such antibodies. Non-limiting examples of such antibody detection assays include ELISA, RIA, and Western blotting.

[0135] The disclosure includes a method of producing an antibody and/or immune response in a subject as described herein. In some embodiments, the method comprises at least i) identifying or selecting a first PRRSV isolate comprising a polypeptide molecule containing a first HV-2 hypervariable region; ii) identifying or selecting a second PRRSV isolate comprising a polypeptide molecule containing a second HV-2 hypervariable region different from said first hypervariable region; and iii) administrating the first and second isolates to a subject to produce an antibody and/or immune response in said subject. In some embodiments, the method may include selection of one or more additional isolates with additional different HV-2 regions followed by their administration with the first and second isolates. In other embodiments, the method may include administration of one or more unselected isolates with the first and second isolates.

[0136] The amount of the first and second isolates to administer should of course be sufficient to produce a desired antibody and/or immune response. In some embodiments, the administered amount is sufficient to produce a vaccinated or protected state in the subject against subsequent PRRSV infection by one or more isolates.

[0137] In some cases, the identifying or selecting may comprise i) amino acid sequence analysis of the PRRSV GP5 ectodomain HV-2 hypervariable region; ii) PCR-based or antibody-based detection of the PRRSV GP5 ectodomain HV-2 hypervariable region; or iii) knowing the PRRSV GP5 ectodomain HV-2 hypervariable region sequence relative to another isolate.

[0138] In other embodiments, a method of producing an antibody and/or immune response comprises administration of a first polypeptide (antigenic) domain comprising an HV-2 region selected from D-1, D-2, D-3, D-4, D-5, D-6, D-7, or D-8, and a second polypeptide (antigenic) domain comprising an HV-2 region selected from S-1, S-2, S-3, S-4, S-5, S-6, S-7, or S-8. In many cases, the combination with two or more different polypeptides (antigenic) domains selected from D-1, D-2, D-3, D-4, D-5, D-6, D-7, D-8, S-1, S-2, S-3, S-4, S-5, S-6, S-7 and S-8 is advantageously used in North America.

[0139] In other embodiments, the administration comprises two or more polypeptide (antigenic) domains selected from E-1, E-2, E-3, E-4, E-5, E-6, E-7, and E-8. In many cases, this combination is advantageously used in Europe. In additional embodiments, a combination of two or more different polypeptide (antigenic) domains may be selected from the 24 subgroups depending on the PRRSV isolates found in a particular geographic regions. Non-limiting examples include the isolates found in South Korea, China, Japan, Southeast Asia, or South America. In additional embodiments, a combination used in S. Korea, China, or Japan may be the same as one used in North America. In other embodiments, a domain of any of E-1, E-2, E-3, E-4, E-5, E-6, E-7, and E-8 may be excluded from a combination of domains for use in North America or an Asian location.

[0140] In further embodiments, a combination of two or more polypeptide (antigenic) domains, or polypeptide molecules or isolates containing them, comprising at least one from each of subgroups detected at a geographic region may be administered in the practice of the disclosure. Administration of the polypeptide (antigenic) domains, or polypeptide molecules or isolates containing them, may be by any suitable means known to the skilled person. Non-limiting examples include injection, intranasal administration, or oral administration, of one or more disclosed isolates or of one or more sample of cells and/or tissue from a PRRSV infected subject.

[0141] If administered or applied separately, the domains, or polypeptide molecules or isolates containing them, may be sequentially administered, with an optional time interval between administrations. Non-limiting examples of the time interval include about 1 to about 2 days; about 1, about 3, or about 5 weeks; about 1, about 3, about 4 or about 6 months, or longer. The same time intervals may be used in between a primary administration event and one or more subsequent “booster” events.

[0142] Whether administered together or separately, the polypeptide molecule(s) may be membrane bound or membrane associated, such by association with a lipid bilayer. In some cases, the membrane is from a cell, such as a fragment of a cellular membrane. In other embodiments, the membrane is that of a vesicle, such as a liposome, oil-in-water or water-in oil suspension. Non-limiting examples of a cell derived membrane include the outer membrane of a PRRSV particle or other viral particle as described herein.

[0143] Kits

[0144] The polypeptide domains, polypeptide molecules, and isolates, as well as combinations and compositions comprising them and their methods of use may be embodied in one or more kits produced in accordance with well known procedures. The disclosure thus includes a kit with one or more reagents comprising one or more polypeptide domains, polypeptide molecules, or isolates, as described herein, or a combination or composition comprising them, for use in one or more methods as disclosed herein. Such a kit optionally further comprises an identifying description or label or instructions relating to their its use in one or more method of the present disclosure. Such a kit may comprise containers, each with one or more of the various reagents (typically in concentrated form) utilized in the methods. A set of instructions will also typically be included.

[0145] Having now generally described the invention, the same will be more readily understood through reference to the following examples which are provided by way of illustration, and are not intended to be limiting of the present disclosure, unless specified.

### EXAMPLES

### Example 1

### Failure of Conserved GP5 Sequence to Generate Protected State

[0146] The disclosure is based in part upon the recognition that pigs previously infected with a first isolate of PRRSV can recover but be susceptible to a second isolate where both isolates contain a GP5 protein with the same sequence in the Conserved Region. Non-limiting examples of such incidents are shown in Table 2 below, where each incident involved pigs that recovered from infection with one of the identified isolates (the first of each incident set in the table) were then found to be infected with at least one other isolate (the second of each of incidents 1-3 and 5-7) as indicated. A portion of the GP5 sequence including the ectodomain in each of the isolates is indicated, with the Conserved Region as identified in FIG. 1 underlined and differences in the HV2 region indicated in bold.

TABLE 2

| | |
|---|---|
| Incident/ | Relative position number in GP5 protein |

| | |
|---|---|
| Isolates | 21 31 41 51 61 |

| | |
|---|---|
| #1 | |
| Q-05-30318 | VPFCFVALVN ASNNSSSHLQ LIYNLTICEL NGTDWLNKSF D (Group D-7) |
| Q-06-15248 | VPFCFVALVN ASNNSSSHLQ LIYNLTICEL NGTDWLNKNF D (Group D-6) |
| #2 | |
| I-03-28077 | VPFCFVALVN ASNNSSSHLQ LIYNLTICEL NGTDWLNKSF D (Group D-7) |
| I-04-32332 | VPFCFVALVN ASNNSSSHLQ LIYNLTICEL NGTDWLDKTF D (Group D-7) |
| #3 | |
| S-06-20709 | VPFCLAALVN ADSNSSSHLQ LIYNLTICEL NGTDWLNNHF S (Group S-1) |
| S-06-20720 | VPFCLAALVN ADSNSSSHLQ LIYNLTICEL NGTDWLNNRF G (Group D-5) |
| #4 | |
| M-05-2912 | VPFCFAVLAN ASNNSSSHLQ LIYNLTLCEL NGTDWLANKF D (Group D-1) |
| M-06-13702 | VPFCLVALVN ANSNNSSHLQ LIYNLTICEL NGTDWLNRHF S (Group S-5) |
| M-06-18282 | VPFCLVALVN ANSNNSSHLQ LIYNLTICEL NGTDWLNEHF S (Group S-2) |
| #5 | |
| H-04-10314 | VPFCFAALVN ASNNSSSHLQ LIYNLTICEL NGTDWLNEHF S (Group S-2) |
| H-06-14421 | VPFCFVALVN ASNNSSSHLQ LIYNLTICEL NGTDWLNKNF D (Group D-6) |
| #6 | |
| A-00-19757 | VPFXFAVIVN ANNNSSSHFQ LIYNLTLCEL NGTEWLNKKF D (Group D-4) |
| A-00-53953 | VPFWFAVLVD ANSNSSSHFQ LIYNLTICEL NGTDWLNNKF D (Group D-5) |
| #7 | |
| G-00-3628 | VPSCFVAPVN ANDNNSSKLQ LIYNLTLCEL NGTDWLAGKF D (Group D-3) |
| G-05-6157 | VPFCFAVIVN ASNNSSSHFQ LIYNLTLCEL NGTDWLAEHF N (Group D-1) |

[0147] Based upon a study of such incidents, a discovery was made that antibodies directed against the Conserved Region in a GP5 protein of an isolate are insufficient to provide protection against a subsequent PRRSV. Additionally, the sequences of the HV-1 region did not provide an adequate explanation for the incidents. A majority of the incidents shown include no change in the HV1 sequence. This led to the discovery that the sequence variation in the HV-2 region participates in evading the immune surveillance of an animal previously exposed to a PRRSV with a different sequence in the HV-2 region. Stated differently, the conserved sequence in the GP5 ectodomain as shown above is unable to produce an antibody or immune response that is protective against another PRRSV with a different HV-2 region in the GP5 protein.

[0148] This discovery led, in part, to the disclosed combinations, compositions, and methods.

### Example 2

### Propagation of PRRSV Isolates

[0149] Methods for the propagation and maintenance of PRRSV isolates has been previously reported (see for example Meng et al., 1994, J. Gen. Virol. 75:1795-1801 and Meng et al., 1996, J. of Vet. Diag. Invest. 8:374-381). Non-limiting examples include the use of cell line ATCC CRL 11171, which can be grown in monolayers suitable for inoculation with a viral isolate. Alternative cells and cell lines include MA-104, PSP-36, PSP-36-SAH, MARC-145 and porcine alveolar macrophages.

[0150] As a non-limiting example, a multiplicity of infection (moi) of about 0.1, 0.5, or 1 may be used followed by incubation for about 48 hours prior to confirmation of infection and viral replication. Confirmation may be by removal of supernatant (culture media) and fixing the cells followed by detection with a labeled anti-PRRSV antibody, such as a monoclonal antibody specific for the N protein (encoded by ORF 7) or an antibody against a particular HV2 region of a GP5 protein as described herein.

### Example 3

### Virus Isolate Combinations

[0151] As described herein, PRRSV isolates may be classified (identified) and selected for use in a combination of the disclosure at least on the basis of the HV2 sequence. The following data shows a portion of the GP5 sequence (including the ectodomain) in each of numerous representative PRRSV isolates, some of which differ in regions outside the ectodomain. The locations of the HV 1, conserved region (CR), and HV2 as described herein are indicated at the bottom of the data, with the indication of the start of the HV 1 being a non-limiting representative example.

[0152] The classification of the sequences into the disclosed Groups is included, and combinations of isolates from different subgroups may be used in the practice of the disclosure. So as one non-limiting example, a combination of a D-4 isolate (Ingelvac-ATP), a D-1 isolate (Ingelvac-MLV or one of MJ-3 to MJ-14), an S-1 isolate (MJ-1 or MJ-2), and a D-3 isolate (MJ-15 or MJ-16) may be used to produce an immune response in a subject as disclosed herein.

[0153] Another non-limiting example is a combination of a D-1 isolate (one of MJ-17 to MJ-27), a D-6 isolate (one of MJ-28 to MJ-30), a D-2 isolate (MJ-34 or MJ-35), and a D-3 isolate (such as MJ-36). All other combinations of isolates represented by the data below, and in accordance with the disclosure, are specifically contemplated for preparation and use as described herein.

All Strains including European Strain (LV)

| | |
|---|---|
| Ingelvac-ATP | LVNANSNSSSHLQLIYNLTLCELNGTDWLKDKFD (Group D-4) |
| VR-2332 | LANASNDSSSHLQLIYNLTLCELNGTDWLANKFD (Group D-1) |
| Ingelvac-MLV | LANASNDSSSHLQLIYNLTLCELNGTDWLANKFD (Group D-1) |
| Prime-Pac | LVNASYSSSSHLQLIYNLTLCELNGTDWLANKFD (Group D-1) |
| MJ-1 | LANASSNSSSHLQLIYNLTICELNGTDWLNNHFS (Group S-1) |
| MJ-2 | LANANSNSSSHLQLIYNLTICELNGTDWLNNHFS (Group S-1) |
| MJ-3 | LANASNDSSSHLQLIYNLTLCELNGTDWLANKFD (Group D-1) |
| MJ-4 | LANASNGSSSHLQLIYNLTLCELNGTDWLANKFD (Group D-1) |
| MJ-5 | LANASNHSSSHLQLIYNLTLCELNGTDWLANKFD (Group D-1) |
| MJ-6 | LANASNNSSSHLQLIYNLTLCELNGTDWLANKFD (Group D-1) |
| MJ-7 | LASASNSSSSHLQLIYNLTLCELNGTDWLANKFD (Group D-1) |
| MJ-8 | LATPSPSSSSHLQLIYNLTLCELNGTDWLANKFD (Group D-1) |
| MJ-9 | LANASNANSSHLQLIYNLTLCELNGTDWLANKFD (Group D-1) |
| MJ-11 | LANASNVNSSHLQLIYNLTLCELNGTDWLANKFD (Group D-1) |
| MJ-12 | LANASNDNSSHLQLIYNLTLCELNGTDWLANKFD (Group D-1) |
| MJ-13 | LANASNSNSSHLQLIYNLTLCELNGTDWLANKFD (Group D-1) |
| MJ-14 | LANASNSNSSHLQLIYNLTLCELNGTDWLADKFD (Group D-1) |
| MJ-15 | LANASNGNSSHLQLIYNLTLCELNGTDWLAGKFD (Group D-3) |
| MJ-16 | LANASNSSNSHLQLIYNLTLCELNGTDWLAGKFD (Group D-3) |
| MJ-17 | LANASNDSSSHLQLIYNLTLCELNGTDWLADKFD (Group D-1) |
| MJ-18 | LANASNTSSSHLQLIYNLTLCELNGTDWLADKFD (Group D-1) |
| MJ-19 | LANASNNSSSHLQLIYNLTLCELNGTDWLADKFD (Group D-1) |
| MJ-20 | LANANNTSSSHLQLIYNLTLCELNGTDXLAEKFD (Group D-1) |
| MJ-21 | LANANNSSSSHLQLIYNLTLCELNGTDWLANKFD (Group D-1) |
| MJ-22 | LANASNNSSSHLQLIYNLTLCELNGTDWLANQFD (Group D-6) |
| MJ-23 | LANASSNSSSHLQLIYNLTLCELNGTDWLANKFD (Group D-1) |
| MJ-24 | LANASANSSSHLQLIYNLTLCELNGTDWLANKFD (Group D-1) |
| MJ-25 | LANASHNSSSHLQLIYNLTLCELNGTDWLANKFD (Group D-1) |
| MJ-26 | LANASQNSSSHLQLIYNLTLCELNGTDWLANKFD (Group D-1) |
| MJ-27 | LANASSNSSSHLQLIYNLTLCELNGTDWLANRFD (Group D-1) |
| MJ-28 | LANASSDNSSHLQLIYNLTLCELNGTDWLANNFD (Group D-6) |
| MJ-29 | LANASSDNSSHLQLIYNLTLCELNGTDWLANNFD (Group D-6) |
| MJ-30 | LASANSINSPHLQLIYNLTLCELNGTDWLAGEFD (Group D-6) |
| MJ-31 | LASASNNSSSRLQLIYNLTLCELNGTDWLADRFN (Group D-1) |
| MJ-32 | LADAHSSSSSHLQLIYNLTLCELNGTDWLADRFD (Group D-1) |
| MJ-33 | LANAGNNSSSHLQLIYNLTLCELNGTEWLAERFD (Group D-1) |
| MJ-34 | LGSASSNSSSHFQLIYNLTLCELNGTDWLASRFD (Group D-2) |
| MJ-35 | LVDANNSSSSHFQLIYNLTICELNGTDWLKARFD (Group D-2) |
| MJ-36 | LVDANNSSSSHFQLIYNLTICELNGTDWLAARFD (Group D-3) |
| MJ-37 | LVDANGNSSSHLQLIYNLTLCELNGTDWLANRFD (Group D-1) |
| MJ-38 | LVNANSTSSSHIQLIYNLTLCELNGTDWLGDKFD (Group D-1) |
| MJ-39 | LVNANSSSSSHIQLIYNLTLCELNGTDWLTNKFD (Group D-4) |
| MJ-40 | LVNANSSSSSHLQSIYNLTLCELNGTDWLGNKFD (Group D-1) |
| MJ-41 | LVDANSSSSSHFQLIYNLTLCELNGTDWLNDKFD (Group D-5) |
| MJ-42 | LVDANSSSSSHFQLIYNLTLCELNGTDWLNEKFD (Group D-5) |
| MJ-43 | LVNANSSSSSHFQLIYNLTLCELNGTDWLNEKFD (Group D-5) |
| MJ-44 | LVNANSSSSSHFQLIYNLTLCELNGTDWLADKFD (Group D-1) |
| MJ-45 | LVNANSSSSSHFQLIYNLTLCELNGTDWLGNKFD (Group D-1) |
| MJ-46 | LANANSSSSSHFQLIYNLTLCELNGTDWLDKKFD (Group D-4) |
| MJ-47 | LVNANSASSSHSQLIYNLTLCELNGTDWLDGKFE (Group D-1) |
| MJ-48 | LVNANSASSSHSQLIYNLTLCELNGTDWLAGKFE (Group D-3) |
| MJ-49 | LVNANSTSSSPFQLIYNLTLCELNGTDWLQGKFN (Group D-1) |
| MJ-50 | IANASSNSSSHIQLIYNLTLCELNGTDWLAGKFD (Group D-3) |
| MJ-51 | IVNANSNSSSHIQLIYNLTLCELNGTDWLADKFD (Group D-1) |
| MJ-52 | IVNANSNSSSHFQLIYNLTLCELNGTDWLANKFD (Group D-1) |
| MJ-53 | VVNANSNSSSHFQSIYNLTLCELNGTKWLATKFD (Group D-2) |
| MJ-54 | LDNANSTSSSHFQSIYNLTLCELNGTEWLAENFD (Group D-6) |
| MJ-55 | LDNANSTSSSHFQSIYNLTLCELNGTKWLAEHFD (Group D-1) |
| MJ-56 | LVNANSTSSSHFQSIYNLTLCELNGTDWLKEKFD (Group D-4) |
| MJ-57 | LVDANSSSSSHFQSIYNLTLCELNGTDWLTERFD (Group D-4) |
| MJ-58 | LVNANSNSSSHFQLIYNLTLCELNGTDWLAQKFD (Group D-1) |
| MJ-59 | LVNANSNSSSHFQLIYNLTLCELNGTDWLAKKFD (Group D-2) |
| MJ-60 | LVDANSNSSSHFQLIYNLTLCELNGPDWLKKNFD (Group D-6) |
| MJ-61 | LVNANSNSSSHFQLIYNLTLCELNGTDWLKEKFD (Group D-4) |
| MJ-62 | LVGANGNSSSHFQLIYNLTLCELNGTDWLDEKFD (Group D-5) |
| MJ-63 | LVNASSNSSSHFQLIYNLTLCELNGTDWLKNKFD (Group D-4) |
| MJ-64 | LVNAHSNSSSHFQSIYNLTLCELNGTDWLDKKFD (Group D-4) |
| MJ-65 | LVNAHDNSSSHFQLIYNLTLCELNGTDWLNKKFD (Group D-4) |
| MJ-66 | LVNASNTSSSYFQSIYNLTLCELNGTDWLKDKFD (Group D-4) |
| MJ-67 | LVNASNSSSSHFQLIYNLTLCELNGTDWLQGKFD (Group D-1) |
| MJ-68 | IVNASNSNSSHLQSIYSLTLCELNGTEWLGKNFD (Group D-6) |
| MJ-69 | LVNANNSSSSHFQSIYNLTLCELNGTEWLAKNFN (Group D-6) |
| MJ-70 | LVNASSNNSSHFQLIYNLTLCELNGTEWLAKNFI (Group D-6) |
| MJ-71 | LVNANSSSSSHLQLIYNLTLCELNGTDWLKDKFD (Group D-4) |
| MJ-72 | LVNANSNSSSHLQLIYNLTLCELNGADWLKDKFA (Group D-4) |
| MJ-73 | LVNASNSNSSHLQLIYNLTLCELNGTDWLGNKFN (Group D-1) |
| MJ-74 | LVNANSNNSSHLQLIYNLTLCSLNGTDWLANKFD (Group D-1) |
| MJ-75 | LASANNNHSSHLQSIYNLTLCELNGTDWLSDKFD (Group D-4) |
| MJ-76 | LASANGNHSSHLQSIYNLTLCELNGTDWLRSRFS (Group S-4) |
| MJ-77 | LVGASNTSSSHFQLIYNLTLCELNGTDWLNNHFY (Group S-7) |
| MJ-78 | IVDANSNSSSHFQLIYNLTLCELNGTDWLNNHFN (Group D-5) |
| MJ-79 | LVDANSNSSSHFQLIYNLTLCELNGTDWLNNHFT (Group S-7) |
| MJ-80 | PVNANNGSSSYSQLIYNLTICELNGTDWLNSKFD (Group D-4) |
| MJ-81 | PVNANNGTSSYSQLIYNLTICELNGTEWLGSKFD (Group D-2) |
| MJ-82 | LVNAANTSSSYSQLIYNLTLCELNGTDWLVNRFD (Group D-1) |
| MJ-83 | LANANNTSSSYSQLIYNLTLCELNGTDWLVGKFE (Group D-3) |
| MJ-84 | LANANSTSSSYSQLIYNLTICELNGTDWLDDNFD (Group D-6) |
| MJ-85 | LVNANSSSSSYSQLIYNLTLCELNGTDWLDKKFY (Group S-7) |
| MJ-86 | LVNANNTSSSYSQLIYNLTLCELNGADWLKEHFS (Group S-5) |
| MJ-87 | LVNANNTNSSYSQLIYNLTLCELNGTDWLKGHFS (Group S-4) |
| MJ-88 | LVNANSTSSSYSQLIYNLTLCELNGTEWLGNSFN (Group D-7) |
| MJ-89 | LVNANSTSSSYSQLIYNLTLCELNGTEWLGTKFS (Group S-4) |
| MJ-90 | LVNANSTSSSYSQLIYNLTLCELNGTEWLGEKFS (Group S-3) |
| MJ-91 | LVNANSTNSSYSQLIYNLTLCELNGTEWLGKNFS (Group S-8) |
| MJ-92 | LVNANSTNSSYSQLIYKLTLCELNGTEWLGKKFS (Group S-4) |
| MJ-93 | LVNANSTSSSYSQLIYNLTLCELNGTDWLNEKFS (Group S-2) |
| MJ-94 | LVNANSTSSSYSQLIYNLTLCELNGTDWLNDKFS (Group S-2) |
| MJ-95 | LVNANSTSSSYSQLIYNLTLCELNGTDWLDGHFS (Group S-3) |
| MJ-96 | LVNANSTSSSYSQLIYNLTICELNGTDWLNGQFS (Group S-3) |
| MJ-97 | LVNANNTSSSYSQLIYNLTICELNGTDWLNGRFS (Group S-8) |
| MJ-98 | LVNANNTSSSYSQLIYNLTICELNGTDWLNGKFS (Group S-3) |
| MJ-99 | LVNANSTSSSYSQLIYNLTICELNGTDWLNEHFS (Group S-2) |
| MJ-100 | LVNASNNSSSYSQLIYNLTLCELNGTDWLNKKFS (Group S-5) |
| MJ-101 | LVNASNNSSSHLQLIYNLTICELNGTDWLDKTFD (Group D-7) |
| MJ-102 | LVNASNNSSSHLQLIYNLTICELNGTDWLDKSFD (Group D-7) |
| MJ-103 | LVNASNNSSSHLQLIYNLTICELNGTDWLNKTFD (Group D-7) |
| MJ-104 | LVNASNNSSSHLQLIYNLTICELNGTDWLNKSFD (Group D-7) |
| MJ-105 | LVNASNNSSSHLQLIYNLTICELNGTDWLNRSFD (Group D-7) |
| MJ-106 | LVNASNNSSSHLQLIYNLTICELNGTDWLNFSFD (Group D-7) |
| MJ-107 | LVNASNNSSSHLQLIYNLTICELNGTDWLSNNFD (Group D-6) |
| MJ-108 | LVNASNNGSSHLQLIYNLTICELNGTDWLNNTFD (Group D-7) |
| MJ-109 | LVNANSNSSSHLQLIYNLTICELNGTDWLNDHFS (Group S-2) |
| MJ-110 | LVNANSNSSSHLQLIYNLTICELNGTDWLNFHFS (Group S-2) |
| MJ-111 | LVNANSNSSSHLQLIYNLTICELNGTDWLNSHFS (Group S-5) |
| MJ-112 | LVNAHSNSSSHLQLIYNLTICELNGTDWLNKHFS (Group S-5) |
| MJ-113 | LVNANSSNSSHLQLIYNLTICELNGTDWLNNHFS (Group S-1) |
| MJ-114 | LVNASNDSSSHLQLIYNLTICELNGTDWLNGHFS (Group S-3) |
| MJ-115 | LVNASNSSSSNLQLIYNLTICELNGTDWLKNHFS (Group S-5) |
| MJ-116 | LVNASSNSSSHLQLIYNLTICELNGTDWLFNHFS (Group S-1) |
| MJ-117 | LVNANSNSSSHLQLIYNLTICELNGTDWLKNHFS (Group S-5) |
| MJ-118 | LVNANSNSSSNLQLIYNLTICELNGTEWLGSHFS (Group S-4) |
| MJ-119 | LVNADSNSSSHLQLIYNLTICELNGTDWLNNHFG (Group D-5) |
| MJ-120 | LVNANNSSSSHTQLIYNLTLCELNGTFWLSHKFD (Group D-8) |
| MJ-121 | LVNAANSSSSHFQSIYNLTLCELNGTDWLSKKFD (Group D-8) |
| MJ-122 | LVNANNTSSSHFQLIYNLTLCELNGTDWLKYKFE (Group D-8) |
| MJ-123 | LVDANSNSSSHFQLIYNLTICELNGTDWLYKHFD (Group D-8) |
| MJ-124 | FADGNGNNSTY-QYIYNLTICELNGTNWLSGHFE (Group E-1) |
| MJ-125 | FADGNGNNSTY-QYIYNLTICELNGTNWLSDHFE (Group E-1) |
| MJ-126 | FADGNDNNSTY-QYIYNLTICELNGTNWLSAHFE (Group E-1) |
| MJ-127 | FADGNGNNSTY-QYIYNLTICELNGTDWLSAHFE (Group E-2) |
| MJ-128 | FADGNGNDSTY-QYIYDLTICFLNGTHWLSNHFV (Group E-8) |
| MJ-129 | FADGNGNDSTY-QYIYNLTICELNGTSWLSDHFE (Group E-4) |
| MJ-130 | FADGSGNNSTY-QYIYNLTICELNGTDWLSGHFN (Group E-2) |
| MJ-131 | FADGSGNNSTY-QYIYNLTICELNGTKWLSGHFD (Group E-3) |
| MJ-132 | FADGNGNSSTY-QYIYNLTICELNGTTWLSGHFN (Group E-4) |
| MJ-133 | FADGNGNSSTY-QYIYNLTICELNGTNWLSGHFN (Group E-1) |
| MJ-134 | FADGNGNNSTY-QYIYNLTICELNGTDWLSNHFS (Group E-6) |
| MJ-135 | FADGNDNNSTY-QYIYNLTICELNGTNWLSNHFS (Group E-5) |
| MJ-136 | FADGNGDSSTYQYIYNLTICELNGTDWLSSHFG (Group E-7) |
| LV | FADGNGDSSTY-QYIYNLTICELNGTDWLSSHFG (Group E-7) |
| | \|← HV1 →\|←C.Region→\|← HV2 →\| |

[0154] All references cited herein are hereby incorporated by reference in their entireties, whether previously specifically incorporated or not. As used herein, the terms “a”, “an”, and “any” are each intended to include both the singular and plural forms.

[0155] Having now fully described the invention, it will be appreciated by those skilled in the art that the same can be performed within a wide range of equivalent parameters, concentrations, and conditions without departing from the spirit and scope of the disclosure and without undue experimentation. While the invention has been described in connection with specific embodiments thereof, it will be understood that it is capable of further modifications. This application is intended to cover any variations, uses, or adaptations of the disclosure following, in general, the principles of the disclosure and including such departures from the present disclosure as come within known or customary practice within the art to which the disclosure pertains and as may be applied to the essential features hereinbefore set forth.

What is claimed is:

1. An immunogenic composition comprising at least a first and a second antigenic domain, each domain comprising
a variable HV-1 region of about 13 amino acids and a conserved GP5 motif, represented by the sequence C(E/S)LNG(T/A), SEQ ID NO: 1, chemically linked to an HV-2 hypervariable region comprising about eight amino acid residues,
wherein said first and second antigenic domains contain different HV-2 hypervariable regions.

2. The composition of claim 1, wherein at least one of said first and second antigenic domains comprises an HV-2 hypervariable region represented by the sequence X₀WLX₁X₂X₃X₄X₅, wherein each of X₀, X₁, X₂, X₃, X₄, and X₅ is independently one of the 20 naturally occurring amino acid residues, except that X₅ is not cysteine, methionine, proline, phenylalanine, or tryptophan.

3. The composition of claim 2 wherein said HV-2 region is represented by the sequence X₀WLX₁X₂X₃X₄X₅ wherein X₅ is not cysteine, methionine, proline, phenylalanine, tryptophan, serine, threonine, or tyrosine, and represented by
D-1: wherein X₁ is an aliphatic amino acid residue, X₂ is an acidic amino acid residue (or wherein X₁ is an acidic amino acid residue and X₂ is an aliphatic amino acid residue), X₃ is a basic amino acid residue, and X₄ is an amino acid residue comprising an aromatic ring, such as phenylalanine (F);
D-2: wherein X₁ is an aliphatic amino acid residue, X₂ is serine (S), threonine (T), tyrosine (Y) or an basic amino acid residue (or wherein X₁ is serine (S), threonine (T), tyrosine (Y) or a basic amino acid residue and X₂ is an aliphatic amino acid residue), X₃ is a basic amino acid residue, and X₄ is an amino acid residue comprising an aromatic ring, such as phenylalanine (F);
D-3: wherein each of X₁ and X₂ is independently an aliphatic amino acid residue, X₃ is a basic amino acid residue, and X₄ is an amino acid residue comprising an aromatic ring, such as phenylalanine (F);
D-4: wherein X₁ is an acidic amino acid residue, X₂ is serine (S), threonine (T), tyrosine (Y) or a basic amino acid residue (or wherein X₁ is serine (S), threonine (T), tyrosine (Y) or a basic amino acid residue and X₂ is an acidic amino acid residue), X₃ is a basic amino acid residue, and X₄ is an amino acid residue comprising an aromatic ring, such as phenylalanine (F);
D-5: wherein each of X₁ and X₂ is independently an acidic amino acid residue, X₃ is a basic amino acid residue, and X₄ is an amino acid residue comprising an aromatic ring, such as phenylalanine (F);
D-6: wherein each of X₁ and X₂ is independently one of the 20 naturally occurring amino acid residues, X₃ is an acidic amino acid residue, and X₄ is an amino acid residue comprising an aromatic ring, such as phenylalanine (F);
D-7: wherein each of X₁ and X₂ is independently one of the 20 naturally occurring amino acid residues, X₃ is a non-aromatic amino acid residue with a hydroxyl containing R-group, and X₄ is an amino acid residue comprising an aromatic ring, such as phenylalanine (F); or
D-8: wherein each of X₁ and X₂ is independently serine (S), threonine (T), tyrosine (Y) or a basic amino acid residue, X₃ is a basic amino acid residue, and X₄ is an amino acid residue comprising an aromatic ring, such as phenylalanine (F).

4. The composition of claim 2 wherein said HV-2 region is represented by the sequence X₀WLX₁X₂X₃X₄X₅ and represented by
S-1: wherein X₁ is an acidic amino acid residue, X₂ is asparagine (N), X₃ is a basic amino acid residue, X₄ is an amino acid residue comprising an aromatic ring, such as phenylalanine (F), and X₅ is S;
S-2: wherein each of X₁ and X₂ is independently an acidic amino acid residue except that X₂ is not asparagine (N), X₃ is a basic amino acid residue, X₄ is an amino acid residue comprising an aromatic ring, such as phenylalanine (F), and X₅ is S;
S-3: wherein X₁ is an aliphatic amino acid residue, X₂ is an acidic amino acid residue (or wherein X₁ is an acidic amino acid residue and X₂ is an aliphatic amino acid residue), X₃ is a basic amino acid residue, X₄ is an amino acid residue comprising an aromatic ring, such as phenylalanine (F), and X₅ is S;
S-4: wherein X₁ is an aliphatic amino acid residue, X₂ is serine (S), threonine (T), tyrosine (Y) or a basic amino acid residue (or wherein X₁ is serine (S), threonine (T), tyrosine (Y) or a basic amino acid residue and X₂ is an aliphatic amino acid residue; or where each of X₁ and X₂ is independently serine (S), threonine (T), tyrosine (Y) or a basic amino acid residue; or where each of X₁ and X₂ is independently an aliphatic amino acid residue), X₃ is a basic amino acid residue, X₄ is an amino acid residue comprising an aromatic ring, such as phenylalanine (F), and X₅ is S;
S-5: wherein X₁ is an acidic amino acid residue, X₂ is serine (S), threonine (T), tyrosine (Y) or a basic amino acid residue (or wherein X₁ is serine (S), threonine (T), tyrosine (Y) or a basic amino acid residue and X₂ is an acidic amino acid residue except N (Asn)), X₃ is a basic amino acid residue, X₄ is an amino acid residue comprising an aromatic ring, such as phenylalanine (F), and X₅ is S;
S-6: wherein X₁ is serine (S), threonine (T), tyrosine (Y) or a basic amino acid residue, X₂ is an asparagine (N), X₃ is a basic amino acid residue, X₄ is an amino acid residue comprising an aromatic ring, such as phenylalanine (F), and X₅ is S;
S-7: wherein each of X₁ and X₂ is independently one of the 20 naturally occurring amino acid residues, X₃ is a basic amino acid residue, X₄ is an amino acid residue comprising an aromatic ring, such as phenylalanine (F), and X₅ is T or Y; or
S-8: wherein X₁ is an acidic amino acid residue, X₂ is an acidic amino acid residue (or wherein X₁ is an acidic amino acid residue and, X₂ is an aliphatic amino acid residue, or alternatively wherein X₁ is an aliphatic amino acid residue and, X₂ is an acidic amino acid residue), X₃ is an acidic amino acid residue, X₄ is an amino acid residue comprising an aromatic ring, such as phenylalanine (F), and X₅ is S.

5. The composition of claim 1 wherein said HV-2 region is represented by
the sequence NWLSX₂X₃X₄X₅ (represented by E-1), wherein each of X₂, X₃, and X₄ is independently one of the 20 naturally occurring amino acid residues, and X₅ is an acidic amino acid residue;
the sequence X₀WLX₁X₂X₃X₄X₅ (represented by E-2), wherein X₀ is an acidic amino acid residue except for asparagine (N), each of X₁, X₂, X₃, and X₄ is independently one of the 20 naturally occurring amino acid residues, and X₅ is an acidic amino acid residue;
the sequence X₀WLX₁X₂X₃X₄X₅ (represented by E-3), wherein X₀ is a basic amino acid residue, each of X₁, X₂, X₃, and X₄ is independently one of the 20 naturally occurring amino acid residues, and X₅ is an acidic amino acid residue;
the sequence X₀WLX₁X₂X₃X₄X₅ (represented by E-4), wherein X₀ is any non-acidic and non-basic amino acid residue, each of X₁, X₂, X₃, and X₄ is independently one of the 20 naturally occurring amino acid residues, and X₅ is an acidic amino acid residue;
the sequence NWLSX₂X₃X₄X₅ (represented by E-5), wherein each of X₂, X₃ and X₄ is independently one of the 20 naturally occurring amino acid residues, and X₅ is Serine (S) or Threonine (T);
the sequence X₀WLX₁NX₃X₄X₅ (represented by E-6), wherein X₀ is any amino acid residue except asparagine (N), each of X₁, X₃, and X₄ is independently one of the 20 naturally occurring amino acid residues, and X₅ is Serine (S) or Threonine (T);
the sequence X₀WLX₁X₂X₃X₄X₅ (represented by E-7), wherein X₀ is an acidic amino acid residue except asparagine (N), each of X₁, X₂, X₃, and X₄ is independently one of the 20 naturally occurring amino acid residues except that X₂ is not asparagine (N), and X₅ is any non-acidic amino acid residue; or
the sequence X₀WLX₁X₂X₃X₄X₅ (represented by E-8), wherein X₀ is any non-acidic amino acid residue, each of X₁, X₂, X₃, and X₄ is independently one of the 20 naturally occurring amino acid residues, and X₅ is any non-acidic amino acid residue.

6. The composition of claim 1, wherein said composition comprises a first polypeptide molecule containing said first antigenic domain and a second polypeptide molecule containing said second antigenic domain.

7. The composition of claim 6, wherein each of said first and second polypeptides comprises a GP5 transmembrane domain.

8. The composition of claim 6, wherein at least one of said first and second polypeptides is membrane bound or membrane associated.

9. The composition of claim 6, wherein at least one of said first and second polypeptides is associated with a PRRSV viral particle.

10. The composition of claim 9, wherein said viral particle is a virion.

11. The composition of claim 10, wherein said composition comprises from two to four PRRSV isolates, two of which comprise said first and second domains.

12. The composition of claim 2, wherein said first antigenic domain comprises an HV-2 region selected from D-1, D-2, D-3, D-4, D-5, D-6, D-7, and D-8, and said second antigenic domain comprises an HV-2 region selected from S-1, S-2, S-3, S-4, S-5, S-6, S-7, and S-8.

13. The composition of claim 6, further comprising one or more additional polypeptides comprising a conserved GP5 motif covalently linked to an HV-2 hypervariable region wherein said one or more additional polypeptides contains a HV-2 hypervariable region different from said first and second polypeptides.

14. A method of preparing a composition according to claim 6, said method comprising
identifying or selecting a first polypeptide molecule containing said first domain and a second polypeptide molecule containing said second domain, and
combining said first and second polypeptides to form a composition.

15. The method of claim 14, wherein said combining comprises addition of a pharmaceutically acceptable excipient or carrier.

16. The method of claim 14, wherein said first polypeptide molecule comprises an HV-2 region selected from D-1, D-2, D-3, D-4, D-5, D-6, D-7, and D-8, and said second polypeptide molecule comprises an HV-2 region selected from S-1, S-2, S-3, S-4, S-5, S-6, S-7, and S-8.

17. The method of claim 14, wherein at least one of said polypeptide molecules is membrane bound or membrane associated.

18. The method of claim 14, wherein at least one of said polypeptide molecules is associated with a PRRSV viral particle.

19. The method of claim 18, wherein said viral particle is a virion.

20. The method of claim 19, wherein said combining is of from two to four PRRSV isolates, two of which comprise said first and second polypeptide molecules.

21. A method of producing an immune response in a subject, said method comprising
administrating a composition of claim 1 to said subject to produce an immune response in said subject against said antigenic domains.

22. A method of producing an immune response in a subject, said method comprising at least
identifying or selecting a first PRRSV isolate comprising a polypeptide molecule containing a first HV-2 hypervariable region,
identifying or selecting a second PRRSV isolate comprising a polypeptide molecule containing a second HV-2 hypervariable region different from said first hypervariable region, and
administrating said first and second isolates to said subject to produce an immune response in said subject.

23. The method of claim 22, wherein said selecting comprises
amino acid sequence analysis of the PRRSV GP5 ectodomain HV-2 hypervariable region;
PCR-based or antibody-based detection of the PRRSV GP5 ectodomain HV-2 hypervariable region; or
knowing the PRRSV GP5 ectodomain HV-2 hypervariable region sequence status relative to another isolate.

24. The method of claim 21, wherein said subject is a sow, a gilt, a pregnant sow, or a pregnant gilt.

The application's sequence listing, which the Patent Office published only in electronic form, follows.

SEQUENCE LISTING (1764 sequences)

SEQ ID NO: 1 - protein, 6 aa, Porcine reproductive and respiratory syndrome virus
  MISC_FEATURE (2)..(2): X is E or S
  MISC_FEATURE (6)..(6): X is T or A
CXLNGX

SEQ ID NO: 2 - protein, 6 aa, Porcine reproductive and respiratory syndrome virus
CELNGT

SEQ ID NO: 3 - protein, 6 aa, Porcine reproductive and respiratory syndrome virus
CELNGA

SEQ ID NO: 4 - protein, 6 aa, Porcine reproductive and respiratory syndrome virus
CSLNGT

SEQ ID NO: 5 - protein, 6 aa, Porcine reproductive and respiratory syndrome virus
CSLNGA

SEQ ID NO: 6 - protein, 12 aa, Porcine reproductive and respiratory syndrome virus
  MISC_FEATURE (2)..(2): X is Y or F
  MISC_FEATURE (3)..(3): X is N or D or S or K
  MISC_FEATURE (4)..(4): X is L or S or F or M
  MISC_FEATURE (5)..(5): X is T or P or M
  MISC_FEATURE (6)..(6): X is L or I
  MISC_FEATURE (8)..(8): X is E or S
  MISC_FEATURE (12)..(12): X is T or A
IXXXXXCXLNGX

SEQ ID NO: 7 - protein, 10 aa, Porcine reproductive and respiratory syndrome virus
ANKFDWAVET

SEQ ID NO: 8 - protein, 10 aa, Porcine reproductive and respiratory syndrome virus
ANKFDWAVEP

SEQ ID NO: 9 - protein, 10 aa, Porcine reproductive and respiratory syndrome virus
AGEFDWAVET

SEQ ID NO: 10 - protein, 10 aa, Porcine reproductive and respiratory syndrome virus
ADKFDWAVEP

SEQ ID NO: 11 - protein, 10 aa, Porcine reproductive and respiratory syndrome virus
ADRFDWAVEP

SEQ ID NO: 12 - protein, 10 aa, Porcine reproductive and respiratory syndrome virus
SSHFGWAVET

SEQ ID NO: 13 - protein, 200 aa, Porcine reproductive and respiratory syndrome virus
MLEKCLTAGCCSRLLSLWCIVPFCFAVLANASNDSSSHLQLIYNLTLCELNGTDWLANKFDWAVESFVIFPVLTHIVSYGALTTSHFLDTVALVTVSTAGFVHGRYVLSSIYAVCALAALTCFVIRFAKNCMSWRYACTRYTNFLLDTKGRLYRWRSPVIIEKRGKVEVEGHLIDLKRVVLDGSVATPITRVSAEQWGRP

SEQ ID NO: 14 - protein, 201 aa, Porcine reproductive and respiratory syndrome virus
MRCSHKLGRFLTPHSCFWWLFLLCTGLSWSFADGNGDSSTYQYIYNLTICELNGTDWLSSHFGWAVETFVLYPVATHILSLGFLTTSHFFDALGLGAVSTAGFVGGRYVLCSVYGACAFAAFVCFVIRAAKNCMAYRYARTRFTNFIVDDRGRVHRWKSPIVVEKLGKAEVDGNLVTIKHVVLEGVKAQPLTRTSAEQWEA

SEQ ID NO: 15 - protein, 34 aa, Porcine reproductive and respiratory syndrome virus
SFADGNGDSSTYQYIYNLTICELNGTDWLSSHFG

SEQ ID NO: 16 - protein, 34 aa, Porcine reproductive and respiratory syndrome virus
SFVDGNDNSSTYQYIYNLTICELNGTEWLSSHFD

SEQ ID NO: 17 - protein, 34 aa, Porcine reproductive and respiratory syndrome virus
LANASNDSSSHVQLIYNLTLCELNGTDWLANKFD

SEQ ID NO: 18 - protein, 34 aa, Porcine reproductive and respiratory syndrome virus
LVNASSTSSSHLQLIYNLTICELNGTDWLNEKFD

SEQ ID NO: 19 - protein, 34 aa, Porcine reproductive and respiratory syndrome virus
LVNANTDSSSHLQLIYNLTICELNGTDWLNDKFD

SEQ ID NO: 20 - protein, 34 aa, Porcine reproductive and respiratory syndrome virus
LVNASNNSSSHLQLIYNLTICELNGTDWLNDKFD

SEQ ID NO: 21 - protein, 34 aa, Porcine reproductive and respiratory syndrome virus
LANASANSSSHLQLIYNLTLCELNGTDWLADKFD

SEQ ID NO: 22 - protein, 34 aa, Porcine reproductive and respiratory syndrome virus
SFVDGNDSSSTYQYIYNLTICELNGTEWLSSHFD

SEQ ID NO: 23 - protein, 34 aa, Porcine reproductive and respiratory syndrome virus
SFADGNGDSSTYQYIYNLTICELNGTAWLSSHFD

SEQ ID NO: 24 - protein, 34 aa, Porcine reproductive and respiratory syndrome virus
SFADGNGDSSTYQYIYNLTICELNGTDWLSSHFD

SEQ ID NO: 25 - protein, 34 aa, Porcine reproductive and respiratory syndrome virus
SFADGNGDSSTYQYIYNLTICELNGTEWLSSHFD

SEQ ID NO: 26 - protein, 34 aa, Porcine reproductive and respiratory syndrome virus
SFVDGDNNSSTYQYIYNLTICELNGTNWLSSHFD

SEQ ID NO: 27 - protein, 34 aa, Porcine reproductive and respiratory syndrome virus
SFADGNGSSSTYQYIYNLTICELNGTAWLSSYFD

SEQ ID NO: 28 - protein, 34 aa, Porcine reproductive and respiratory syndrome virus
SFADGSGNSSTYQYIYNLTICELNGTDWLSSHFG

SEQ ID NO: 29 - protein, 34 aa, Porcine reproductive and respiratory syndrome virus
SFADGNGDSSTYQYIYNLTICELNGTEWLSSHFG

SEQ ID NO: 30 - protein, 34 aa, Porcine reproductive and respiratory syndrome virus
SFADGNGNSSTYQYIYNLTICELNGTDWLSGEFH

SEQ ID NO: 31 - protein, 34 aa, Porcine reproductive and respiratory syndrome virus
SFADGNGNSSTYQYIYNLTICELNGTDWLSSHFG

SEQ ID NO: 32 - protein, 34 aa, Porcine reproductive and respiratory syndrome virus; identical to SEQ ID NO: 15

SEQ ID NO: 33 - protein, 34 aa, Porcine reproductive and respiratory syndrome virus; identical to SEQ ID NO: 15

SEQ ID NO: 34 - protein, 34 aa, Porcine reproductive and respiratory syndrome virus; identical to SEQ ID NO: 24

SEQ ID NO: 35 - protein, 34 aa, Porcine reproductive and respiratory syndrome virus; identical to SEQ ID NO: 24

SEQ ID NO: 36 - protein, 34 aa, Porcine reproductive and respiratory syndrome virus
LVNANSASSSHLQLIYNLTLCELNGTDWLADKFD

SEQ ID NO: 37 - protein, 34 aa, Porcine reproductive and respiratory syndrome virus
LGNANSTSSSHLQLIYNLTLCELNGTDWLANKFD

SEQ ID NO: 38 - protein, 34 aa, Porcine reproductive and respiratory syndrome virus
LVNANSTSSSHLQLIYNLTLCELNGTDWLANKFD

SEQ ID NO: 39 - protein, 34 aa, Porcine reproductive and respiratory syndrome virus
LVNANSNSSSHFQLIYNLTLCELNGTDWLANKFD

SEQ ID NO: 40 - protein, 34 aa, Porcine reproductive and respiratory syndrome virus; identical to SEQ ID NO: 39

SEQ ID NO: 41 - protein, 34 aa, Porcine reproductive and respiratory syndrome virus
LVNANSSSSSHFQLIYNLTLCELNGTDWLAEKFD

SEQ ID NO: 42 - protein, 34 aa, Porcine reproductive and respiratory syndrome virus
LVNANSSSSSHFQLIYNLTLCELNGTDWLAGKFD

SEQ ID NO: 43 - protein, 34 aa, Porcine reproductive and respiratory syndrome virus
LANAHGNSSSHLQLIYNLTLCELNGTDWLADRFD

SEQ ID NO: 44 - protein, 34 aa, Porcine reproductive and respiratory syndrome virus
LVNANSSSSSHFQLIYNLTLCELNGTDWLADKFD

SEQ ID NO: 45 - protein, 34 aa, Porcine reproductive and respiratory syndrome virus
LVSANSNSSSHLQLIYNLTLCELNGTDWLANKFD

SEQ ID NO: 46 - protein, 34 aa, Porcine reproductive and respiratory syndrome virus
LVSANSNSSSHLQLIYNLTLCELNGTDWLASRFD

SEQ ID NO: 47 - protein, 34 aa, Porcine reproductive and respiratory syndrome virus
LANASNDSSSHLQLIYNLTLCELNGTDWLANKFD

SEQ ID NO: 48 - protein, 34 aa, Porcine reproductive and respiratory syndrome virus
LVNASYSSSSHLQLIYNLTLCELNGTDWLANKFD

SEQ ID NO: 49 - protein, 34 aa, Porcine reproductive and respiratory syndrome virus
LVNANSNSSSHLQLIYNLTLCELNGTDWLSNKFD

SEQ ID NO: 50 - protein, 34 aa, Porcine reproductive and respiratory syndrome virus; identical to SEQ ID NO: 47

SEQ ID NO: 51 - protein, 34 aa, Porcine reproductive and respiratory syndrome virus; identical to SEQ ID NO: 47

SEQ ID NO: 52 - protein, 34 aa, Porcine reproductive and respiratory syndrome virus
LANASNNSSSHLQLIYNLTLCELNGKDWLANKFD

SEQ ID NO: 53 - protein, 34 aa, Porcine reproductive and respiratory syndrome virus; identical to SEQ ID NO: 47

SEQ ID NO: 54 - protein, 34 aa, Porcine reproductive and respiratory syndrome virus; identical to SEQ ID NO: 47

SEQ ID NO: 55 - protein, 34 aa, Porcine reproductive and respiratory syndrome virus
LANASNNSSSHLQLIYNLTLCELNGTDWLANKFD

SEQ ID NO: 56 - protein, 34 aa, Porcine reproductive and respiratory syndrome virus; identical to SEQ ID NO: 47

SEQ ID NO: 57 - protein, 34 aa, Porcine reproductive and respiratory syndrome virus; identical to SEQ ID NO: 47

SEQ ID NO: 58 - protein, 34 aa, Porcine reproductive and respiratory syndrome virus
LVNASNDSSSHLQLIYNLTLCELNGTDWLANKFD

SEQ ID NO: 59 - protein, 34 aa, Porcine reproductive and respiratory syndrome virus
LVSANANSSSKLQLIYNLTLCELNGTDWLANKFD

SEQ ID NO: 60 - protein, 34 aa, Porcine reproductive and respiratory syndrome virus
LANASANNSSHLQLIYNLTLCELNGTDWLANKFD

SEQ ID NO: 61 - protein, 34 aa, Porcine reproductive and respiratory syndrome virus
LANASANSSSHLQLIYNLTLCELNGTDWLANKFD

SEQ ID NO: 62 - protein, 34 aa, Porcine reproductive and respiratory syndrome virus
IVNASNNSSSHLQLIYNLTLCELNGTDWLADKFD

SEQ ID NO: 63 - protein, 34 aa, Porcine reproductive and respiratory syndrome virus
LVNANNNSSSHLQLIYNLTLCELNGTDWLANRFD

SEQ ID NO: 64 - protein, 34 aa, Porcine reproductive and respiratory syndrome virus
LVNASNNSSSHLQLIYNLTLCELNGTDWLANKFD

SEQ ID NO: 65 - protein, 34 aa, Porcine reproductive and respiratory syndrome virus
LVDASGNSSSHLQLIYNLTLCELNGTDWLANKFS

SEQ ID NO: 66 - protein, 34 aa, Porcine reproductive and respiratory syndrome virus
LVNASNNSSSHFQLIYNLTLCELNGTDWLAGKFD

SEQ ID NO: 67 - protein, 34 aa, Porcine reproductive and respiratory syndrome virus
IVNANSSSSSHFQLIYNLTLCELNGTDWLKNKFD

SEQ ID NO: 68 - protein, 34 aa, Porcine reproductive and respiratory syndrome virus
LVNANSNSSSHLQLIYNLTLCELNGTDWLKDRFD

SEQ ID NO: 69 - protein, 34 aa, Porcine reproductive and respiratory syndrome virus
IVNANSNSSSHFQLIYNLTLCELNGTDWLAEKFD

SEQ ID NO: 70 - protein, 34 aa, Porcine reproductive and respiratory syndrome virus; identical to SEQ ID NO: 67

SEQ ID NO: 71 - protein, 34 aa, Porcine reproductive and respiratory syndrome virus
LPNANENSSSHLQLIYNLTLCELNGTDWLADKFD

SEQ ID NO: 72 - protein, 34 aa, Porcine reproductive and respiratory syndrome virus; identical to SEQ ID NO: 47

SEQ ID NO: 73 - protein, 34 aa, Porcine reproductive and respiratory syndrome virus
LVSANSNSSSHLQLIYNLTLCELNGTDWLASKFD

SEQ ID NO: 74 - protein, 34 aa, Porcine reproductive and respiratory syndrome virus; identical to SEQ ID NO: 47

SEQ ID NO: 75 - protein, 34 aa, Porcine reproductive and respiratory syndrome virus
LANASNGSSSHLQLIYNLTLCELNGTDWLANKFD

SEQ ID NO: 76 - protein, 34 aa, Porcine reproductive and respiratory syndrome virus
LANANNNSSSQLQLIYNLTLCELNGTDWLANKFD

SEQ ID NO: 77 - protein, 34 aa, Porcine reproductive and respiratory syndrome virus; identical to SEQ ID NO: 49

SEQ ID NO: 78 - protein, 34 aa, Porcine reproductive and respiratory syndrome virus
IVNANSNSSSHFQLIYNLTVCELNGTDWLTGKFD

SEQ ID NO: 79 - protein, 34 aa, Porcine reproductive and respiratory syndrome virus; identical to SEQ ID NO: 55

SEQ ID NO: 80 - protein, 34 aa, Porcine reproductive and respiratory syndrome virus; identical to SEQ ID NO: 55

SEQ ID NO: 81 - protein, 34 aa, Porcine reproductive and respiratory syndrome virus
LVNADSNSSSHFQLIYNLTLCELNGTEWLANNFD

SEQ ID NO: 82 - protein, 34 aa, Porcine reproductive and respiratory syndrome virus; identical to SEQ ID NO: 55

SEQ ID NO: 83 - protein, 34 aa, Porcine reproductive and respiratory syndrome virus
LANANNASSSHLQLIYNLTLCELNGTDWLANKFD

SEQ ID NO: 84 - protein, 34 aa, Porcine reproductive and respiratory syndrome virus; identical to SEQ ID NO: 48

SEQ ID NO: 85 - protein, 34 aa, Porcine reproductive and respiratory syndrome virus
SFADGNGNSSTYQYIYNLTICELNGTVWLSTNFY

SEQ ID NO: 86 - protein, 34 aa, Porcine reproductive and respiratory syndrome virus; identical to SEQ ID NO: 15

SEQ ID NO: 87 - protein, 34 aa, Porcine reproductive and respiratory syndrome virus; identical to SEQ ID NO: 15

SEQ ID NO: 88 - protein, 34 aa, Porcine reproductive and respiratory syndrome virus; identical to SEQ ID NO: 15

SEQ ID NO: 89 - protein, 34 aa, Porcine reproductive and respiratory syndrome virus
SFADGNGNSSTYQYIYNLTICELNGTDWLSTKFY

SEQ ID NO: 90 - protein, 34 aa, Porcine reproductive and respiratory syndrome virus; identical to SEQ ID NO: 47

SEQ ID NO: 91 - protein, 34 aa, Porcine reproductive and respiratory syndrome virus
IVNASSNSSSHFQLIYNLTLCELNGTYWLANKFD

SEQ ID NO: 92 - protein, 34 aa, Porcine reproductive and respiratory syndrome virus
LVNANSNSSSHFQLIYNLTLCELNGTDWLNEHFG

SEQ ID NO: 93 - protein, 34 aa, Porcine reproductive and respiratory syndrome virus
LVNANSNSSSHFQLIYNLTLCELNGTDWLAEKFD

SEQ ID NO: 94 - protein, 34 aa, Porcine reproductive and respiratory syndrome virus; identical to SEQ ID NO: 39

SEQ ID NO: 95 - protein, 34 aa, Porcine reproductive and respiratory syndrome virus; identical to SEQ ID NO: 24

SEQ ID NO: 96 - protein, 34 aa, Porcine reproductive and respiratory syndrome virus
SFADGNGNSSTYQYIYNLTICELNGTAWLSDKFY

SEQ ID NO: 97 - protein, 34 aa, Porcine reproductive and respiratory syndrome virus
SFADGNGNSSTYQYIYNLTICELNGTAWLSSNFY

SEQ ID NO: 98 - protein, 34 aa, Porcine reproductive and respiratory syndrome virus
SFADGNGNSSTYLYIYNLTICELNGTDWLSNKYY

SEQ ID NO: 99 - protein, 34 aa, Porcine reproductive and respiratory syndrome virus
SFADGNGDSSTYQYIYNLTICELNGTAWLSSNFY

SEQ ID NO: 100 - protein, 34 aa, Porcine reproductive and respiratory syndrome virus
SFADGNGDSSTYQYIYNLTICELNGTDWLSNNFY

SEQ ID NO: 101 - protein, 34 aa, Porcine reproductive and respiratory syndrome virus
SFADGNGNSSTYQYIYNLTICELNGTNWLSNKFY

SEQ ID NO: 102 - protein, 34 aa, Porcine reproductive and respiratory syndrome virus; identical to SEQ ID NO: 97

SEQ ID NO: 103 - protein, 33 aa, Porcine reproductive and respiratory syndrome virus
FADGSGNSSTYQYIYNLTICELNGTAWLSSHFD

SEQ ID NO: 104 - protein, 34 aa, Porcine reproductive and respiratory syndrome virus
SFADGNGNSSTYQYIYNLTICELNGTDWLSDRFY

SEQ ID NO: 105 - protein, 34 aa, Porcine reproductive and respiratory syndrome virus
SFADGNGNSSTYQYIYNLTICELNGTDWLSNRFY

SEQ ID NO: 106 - protein, 34 aa, Porcine reproductive and respiratory syndrome virus
SFADGNGNSSTYQYIYNLTICELNGTDWLSNKFY

SEQ ID NO: 107 - protein, 34 aa, Porcine reproductive and respiratory syndrome virus
SFADGNGNSSTYQYIYNLTICELNGTDWLSNNFY

SEQ ID NO: 108 - protein, 34 aa, Porcine reproductive and respiratory syndrome virus
SFADGNGDSSTYQYIYNLTICELNGTDWLSDHFY

SEQ ID NO: 109 - protein, 34 aa, Porcine reproductive and respiratory syndrome virus
SFADGNGNSSTYQYIYNLTICELNGTDWLSDHFY

SEQ ID NO: 110 - protein, 34 aa, Porcine reproductive and respiratory syndrome virus; identical to SEQ ID NO: 99

SEQ ID NO: 111 - protein, 34 aa, Porcine reproductive and respiratory syndrome virus
SFADGSGNSSTYQYIYNLTICELNGTDWLSSHFS

SEQ ID NO: 112 - protein, 34 aa, Porcine reproductive and respiratory syndrome virus; identical to SEQ ID NO: 31

SEQ ID NO: 113 - protein, 34 aa, Porcine reproductive and respiratory syndrome virus; identical to SEQ ID NO: 31

SEQ ID NO: 114 - protein, 34 aa, Porcine reproductive and respiratory syndrome virus
SFADGNGNSSTYQYIYNLTICELNGTNWLSSHFG

SEQ ID NO: 115 - protein, 34 aa, Porcine reproductive and respiratory syndrome virus
SFADGNGNSLTYQYIYNLTICELNGTDWLSSHFG

SEQ ID NO: 116 - protein, 34 aa, Porcine reproductive and respiratory syndrome virus; identical to SEQ ID NO: 115

SEQ ID NO: 117 - protein, 34 aa, Porcine reproductive and respiratory syndrome virus; identical to SEQ ID NO: 15

SEQ ID NO: 118 - protein, 34 aa, Porcine reproductive and respiratory syndrome virus; identical to SEQ ID NO: 15

SEQ ID NO: 119 - protein, 34 aa, Porcine reproductive and respiratory syndrome virus
SFADGSGDSSTYQYIYNLTICELNGTAWLSSHFD

SEQ ID NO: 120 - protein, 34 aa, Porcine reproductive and respiratory syndrome virus
SFADGNGNSSTYQYIYNLTICELNGTYWLSSHFS

SEQ ID NO: 121 - protein, 34 aa, Porcine reproductive and respiratory syndrome virus
SFADGNGNSSTYQYIYNLTICELNGTDWLSDKFD

SEQ ID NO: 122 - protein, 34 aa, Porcine reproductive and respiratory syndrome virus
SFADGNGNSSTYQYIYNLTICELNGTAWLSDHFQ

SEQ ID NO: 123 - protein, 34 aa, Porcine reproductive and respiratory syndrome virus
SFAEGNGNSSTYQYIYNLTICELNGTDWLSAHFE

SEQ ID NO: 124 - protein, 34 aa, Porcine reproductive and respiratory syndrome virus
SFADGNGNSSTYQYIYNLTICELNGTHWLSNHFD

SEQ ID NO: 125 - protein, 34 aa, Porcine reproductive and respiratory syndrome virus
SFAECNGNSSTYRSIYNLTICELNGTQWLSDKFD

SEQ ID NO: 126 - protein, 34 aa, Porcine reproductive and respiratory syndrome virus
SFADGNGNSSTYQYIYNLTICELNGTEWLSNKFY

SEQ ID NO: 127 - protein, 34 aa, Porcine reproductive and respiratory syndrome virus
SFADGGGNSSTYQYIYNLTICELNGTAWLSNHFH

SEQ ID NO: 128 - protein, 34 aa, Porcine reproductive and respiratory syndrome virus
SFVAGSGNSSTYQYIYNLTICELNGTDWLSNHFD

SEQ ID NO: 129 - protein, 34 aa, Porcine reproductive and respiratory syndrome virus
SFADGSGNSSTYQYIYNLTICELNGTAWLSSHFD

SEQ ID NO: 130 - protein, 34 aa, Porcine reproductive and respiratory syndrome virus
SFADGNGSSSTYQYIYNLTICELNGTDWLSSHFG

SEQ ID NO: 131 - protein, 34 aa, Porcine reproductive and respiratory syndrome virus; identical to SEQ ID NO: 31

SEQ ID NO: 132 - protein, 34 aa, Porcine reproductive and respiratory syndrome virus; identical to SEQ ID NO: 31

SEQ ID NO: 133 - protein, 34 aa, Porcine reproductive and respiratory syndrome virus
SFADGNGNSSTYQYIYNLTICELNGTAWLSDHFD

SEQ ID NO: 134 - protein, 34 aa, Porcine reproductive and respiratory syndrome virus
SFADGNGNSSTYQYIYDLTICELNGTQWLSDNFY

SEQ ID NO: 135 - protein, 34 aa, Porcine reproductive and respiratory syndrome virus
SFADGNGNSSTYQYIYNLTICELNGTTWLHDRFD

SEQ ID NO: 136 - protein, 34 aa, Porcine reproductive and respiratory syndrome virus; identical to SEQ ID NO: 100

SEQ ID NO: 137 - protein, 34 aa, Porcine reproductive and respiratory syndrome virus; identical to SEQ ID NO: 15

SEQ ID NO: 138 - protein, 34 aa, Porcine reproductive and respiratory syndrome virus; identical to SEQ ID NO: 15

SEQ ID NO: 139 - protein, 34 aa, Porcine reproductive and respiratory syndrome virus; identical to SEQ ID NO: 15

SEQ ID NO: 140 - protein, 34 aa, Porcine reproductive and respiratory syndrome virus
SFADGNGNSSTYQYIYNLTICELNGTAWLANHFE

SEQ ID NO: 141 - protein, 33 aa, Porcine reproductive and respiratory syndrome virus
FADGNGNSSTYQYIYNLTICELNGTGWLANHFE

SEQ ID NO: 142 - protein, 34 aa, Porcine reproductive and respiratory syndrome virus
SFADCNDNSSTYQYIYNLTICELNGTKWLSSHFD

SEQ ID NO: 143 - protein, 34 aa, Porcine reproductive and respiratory syndrome virus
SFVDGNDSSSTYQYIYNLTICELNGTEWLPSHFD

SEQ ID NO: 144 - protein, 34 aa, Porcine reproductive and respiratory syndrome virus
SFADGNGNSSTYQYIYKLTICELNGTEWLSTHFD

SEQ ID NO: 145 - protein, 34 aa, Porcine reproductive and respiratory syndrome virus
SFADGNGNSSTHQYIYNLTICELNGTNWLSNHFG

SEQ ID NO: 146 - protein, 34 aa, Porcine reproductive and respiratory syndrome virus
SFVAGNDNSSTYQYIYNLTICELNGTEWLSGHFA

SEQ ID NO: 147 - protein, 34 aa, Porcine reproductive and respiratory syndrome virus
SFVDGNGNSSTYQYIYNLTICELNGTKWLSSHFY

SEQ ID NO: 148 - protein, 34 aa, Porcine reproductive and respiratory syndrome virus
SFVDGNVSSSTYQYIYDLTICELNGTEWLHSHFD

SEQ ID NO: 149 - protein, 34 aa, Porcine reproductive and respiratory syndrome virus
SFVAGSDNSSTYQYIYNLTICELNGTDWLSNHFD

SEQ ID NO: 150 - protein, 34 aa, Porcine reproductive and respiratory syndrome virus; identical to SEQ ID NO: 146

SEQ ID NO: 151 - protein, 34 aa, Porcine reproductive and respiratory syndrome virus
SFADGNDNSSTYQYIYDLTICELNGTYWLSNHFS

SEQ ID NO: 152 - protein, 34 aa, Porcine reproductive and respiratory syndrome virus
SSVDGNGNSSTYQYIYNLTICELNGTDWLSASFS

SEQ ID NO: 153 - protein, 34 aa, Porcine reproductive and respiratory syndrome virus
SFVAVSGNSSTYQYIYNLTICELNGTNWLSDHFD

SEQ ID NO: 154 - protein, 34 aa, Porcine reproductive and respiratory syndrome virus
SFVAVSGNSSTYQYIYNLTICELNGTNWLPDHFD

SEQ ID NO: 155 - protein, 34 aa, Porcine reproductive and respiratory syndrome virus; identical to SEQ ID NO: 133

SEQ ID NO: 156 - protein, 34 aa, Porcine reproductive and respiratory syndrome virus
SSADGNGNSSTYQYIYNLTICELNGTGWLTAHFE

SEQ ID NO: 157 - protein, 34 aa, Porcine reproductive and respiratory syndrome virus; identical to SEQ ID NO: 47

SEQ ID NO: 158 - protein, 31 aa, Porcine reproductive and respiratory syndrome virus
DGNGNSSTYQYIYNLTICELNGTDWLSSHFG

SEQ ID NO: 159 - protein, 31 aa, Porcine reproductive and respiratory syndrome virus
DGNGNSSTYQYIYNLTICELNGTKWLSSHFD

SEQ ID NO: 160 - protein, 30 aa, Porcine reproductive and respiratory syndrome virus
ASGNSSTYQYIYNLTICELNGTEWLSGHFD

SEQ ID NO: 161 - protein, 30 aa, Porcine reproductive and respiratory syndrome virus
ASGNSSTLQYIYNLTICELNGTDWLANKFD

SEQ ID NO: 162 - protein, 31 aa, Porcine reproductive and respiratory syndrome virus
DGNDNSSTYQYIYNLTICELNGTKWLSSHFD

SEQ ID NO: 163 - protein, 31 aa, Porcine reproductive and respiratory syndrome virus
DGNGNSSTYQYIYNLTICELNGTEWLSSHFS

SEQ ID NO: 164 - protein, 31 aa, Porcine reproductive and respiratory syndrome virus
DGNGNSSTYQYIYNLTICELNGTEWLSSHFD

SEQ ID NO: 165 - protein, 31 aa, Porcine reproductive and respiratory syndrome virus
DGNGNSSTYQYIYNLTICELNGTKWLSGHFD

SEQ ID NO: 166 - protein, 31 aa, Porcine reproductive and respiratory syndrome virus
DGSGNSSTYLYIYNLTICELNGTQWLSDHFS

SEQ ID NO: 167 - protein, 31 aa, Porcine reproductive and respiratory syndrome virus
DGNDNSSTYQYIYNLTICELNGTEWLSSHFD

SEQ ID NO: 168 - protein, 30 aa, Porcine reproductive and respiratory syndrome virus
GSGNSSTYQYIYNLTICELNGTDWLSNHFD

SEQ ID NO: 169 - protein, 31 aa, Porcine reproductive and respiratory syndrome virus
DGNGNSSTYQYIYNLTICELNGTDWLSNHFS

SEQ ID NO: 170 - protein, 31 aa, Porcine reproductive and respiratory syndrome virus
DGSDNSSTYQYIYNLMICELNGTQWLSNHFS

SEQ ID NO: 171 - protein, 31 aa, Porcine reproductive and respiratory syndrome virus; identical to SEQ ID NO: 158

SEQ ID NO: 172 - protein, 34 aa, Porcine reproductive and respiratory syndrome virus
LANASDNSSSHLQLIYNLTLCELNGTDWLANKFD

SEQ ID NO: 173 - protein, 34 aa, Porcine reproductive and respiratory syndrome virus; identical to SEQ ID NO: 55

SEQ ID NO: 174 - protein, 34 aa, Porcine reproductive and respiratory syndrome virus; identical to SEQ ID NO: 47

SEQ ID NO: 175 - protein, 34 aa, Porcine reproductive and respiratory syndrome virus; identical to SEQ ID NO: 47

SEQ ID NO: 176 - protein, 34 aa, Porcine reproductive and respiratory syndrome virus; identical to SEQ ID NO: 47

SEQ ID NO: 177 - protein, 34 aa, Porcine reproductive and respiratory syndrome virus
LANADSNSSSHLQLIYNLTLCELNGTDWLANKFD

SEQ ID NO: 178 - protein, 34 aa, Porcine reproductive and respiratory syndrome virus
LANASNNSSSHLQLIYNLTLCELNGTDWLASKFD

SEQ ID NO: 179 - protein, 34 aa, Porcine reproductive and respiratory syndrome virus; identical to SEQ ID NO: 177

SEQ ID NO: 180 - protein, 34 aa, Porcine reproductive and respiratory syndrome virus; identical to SEQ ID NO: 49

SEQ ID NO: 181 - protein, 34 aa, Porcine reproductive and respiratory syndrome virus
LVNASNGSSSHLQLIYNLTLCELNGTDWLANRFD

SEQ ID NO: 182 - protein, 34 aa, Porcine reproductive and respiratory syndrome virus
LANASANSSSHIQLIYNLTLCELNGTDWLANKFD

SEQ ID NO: 183 - protein, 34 aa, Porcine reproductive and respiratory syndrome virus
LVNANGNSSSHLQLIYNLTLCELNGTDWLANKFD

SEQ ID NO: 184 - protein, 34 aa, Porcine reproductive and respiratory syndrome virus
LVSADRNSSSNLQLIYNLTLCELNGTDWLANKFD

SEQ ID NO: 185 - protein, 34 aa, Porcine reproductive and respiratory syndrome virus; identical to SEQ ID NO: 46

SEQ ID NO: 186 - protein, 34 aa, Porcine reproductive and respiratory syndrome virus; identical to SEQ ID NO: 46

SEQ ID NO: 187 - protein, 34 aa, Porcine reproductive and respiratory syndrome virus
LVNANGNSSSHLQLIYNLTLCELNGTDWLADKFD

SEQ ID NO: 188 - protein, 34 aa, Porcine reproductive and respiratory syndrome virus
LVNANSNSSSHLQLIYNLTLCELNGTDWLKDKFD

SEQ ID NO: 189 - protein, 34 aa, Porcine reproductive and respiratory syndrome virus; identical to SEQ ID NO: 188

SEQ ID NO: 190 - protein, 34 aa, Porcine reproductive and respiratory syndrome virus
SFADGNGNSSTYQYIYDLTICELNGTAWLSGNFH

SEQ ID NO: 191 - protein, 34 aa, Porcine reproductive and respiratory syndrome virus
SFAECNGNSSTHQYIYNLTVCELNGTAWLSSHFD

SEQ ID NO: 192 - protein, 34 aa, Porcine reproductive and respiratory syndrome virus; identical to SEQ ID NO: 105

SEQ ID NO: 193 - protein, 34 aa, Porcine reproductive and respiratory syndrome virus
SFADGNGNSSTYQYIYNLTICELNGTEWLSDKFY

SEQ ID NO: 194 - protein, 34 aa, Porcine reproductive and respiratory syndrome virus; identical to SEQ ID NO: 105

SEQ ID NO: 195 - protein, 34 aa, Porcine reproductive and respiratory syndrome virus
SFADGNGNSSTYQYIYDLTICELNGTDWLSGHFD

SEQ ID NO: 196 - protein, 34 aa, Porcine reproductive and respiratory syndrome virus
SFADGNGNNSTYQYIYNLTICELNGTSWLHGHFD

SEQ ID NO: 197 - protein, 33 aa, Porcine reproductive and respiratory syndrome virus
FADGNGNSSTYQYIYNLTICELNGTEWLSNKFD

SEQ ID NO: 198 - protein, 34 aa, Porcine reproductive and respiratory syndrome virus
SFAECNGNSSTHQYIYNLTICELNGTNWLSNHFD

SEQ ID NO: 199 - protein, 34 aa, Porcine reproductive and respiratory syndrome virus
SFAECNGDSSTSQYIYNLTICELNGTAWLSEHFD

SEQ ID NO: 200 - protein, 34 aa, Porcine reproductive and respiratory syndrome virus
SFADGNGNSSTYQYIYNLTICELNGTDWLSDRFD

SEQ ID NO: 201 - protein, 34 aa, Porcine reproductive and respiratory syndrome virus
SFADGNGNSSTYQYIYNLTICELNGTTWLSKEFD

SEQ ID NO: 202 - protein, 34 aa, Porcine reproductive and respiratory syndrome virus; identical to SEQ ID NO: 126

SEQ ID NO: 203 - protein, 34 aa, Porcine reproductive and respiratory syndrome virus; identical to SEQ ID NO: 126

SEQ ID NO: 204 - protein, 34 aa, Porcine reproductive and respiratory syndrome virus
SFAECTGNSSTYQYIYNLTICELNGTNWLTGHFG

SEQ ID NO: 205 - protein, 34 aa, Porcine reproductive and respiratory syndrome virus
SFADGNGNSSTYQYIYNLTICELNGTAWLSEHFQ

SEQ ID NO: 206 - protein, 34 aa, Porcine reproductive and respiratory syndrome virus; identical to SEQ ID NO: 200

SEQ ID NO: 207 - protein, 34 aa, Porcine reproductive and respiratory syndrome virus
SFAECNGNSSTYQYIYNLTICELNGTDWLSDKFY

SEQ ID NO: 208 - protein, 34 aa, Porcine reproductive and respiratory syndrome virus
SFADGSGNSSTYQYIYDLTICELNGTNWLSGHFD

SEQ ID NO: 209 - protein, 34 aa, Porcine reproductive and respiratory syndrome virus
SFADGNGNSSTYQYIYNLTICELNGTNWLSDKFY

SEQ ID NO: 210 - protein, 34 aa, Porcine reproductive and respiratory syndrome virus
SFADGNGNSSAYQYIYNLTICELNGTDWLSDKFY

SEQ ID NO: 211 - protein, 34 aa, Porcine reproductive and respiratory syndrome virus
SFADGNGNSSTYQYIYNLTICELNGTDWLSDKFY

SEQ ID NO: 212 - protein, 34 aa, Porcine reproductive and respiratory syndrome virus
SFADGNDNSSTYQYIYNLTICELNGTHWLHQHFS

SEQ ID NO: 213 - protein, 34 aa, Porcine reproductive and respiratory syndrome virus
SFADGNGNSSTYQYIYNLTICELNGTAWLSDHFY

SEQ ID NO: 214 - protein, 34 aa, Porcine reproductive and respiratory syndrome virus
SFADGNGNSSTYQYIYNLTICELNGTTWLSNHFY

SEQ ID NO: 215 - protein, 34 aa, Porcine reproductive and respiratory syndrome virus
SFADGSGNSSTYQYIYNLTICELNGTTWLSNHFD

SEQ ID NO: 216 - protein, 34 aa, Porcine reproductive and respiratory syndrome virus
SFADGNGNSSTYQYIYNLTICELNGTAWLHDHFY

SEQ ID NO: 217 - protein, 34 aa, Porcine reproductive and respiratory syndrome virus; identical to SEQ ID NO: 133

SEQ ID NO: 218 - protein, 34 aa, Porcine reproductive and respiratory syndrome virus
SFAGGNGNSSTYQYIYNLTICELNGTAWLSDHFY

SEQ ID NO: 219 - protein, 34 aa, Porcine reproductive and respiratory syndrome virus
SFADGNGNSSTYQYIYNLTICELNGTEWLSSHFH

SEQ ID NO: 220 - protein, 34 aa, Porcine reproductive and respiratory syndrome virus; identical to SEQ ID NO: 31

SEQ ID NO: 221 - protein, 34 aa, Porcine reproductive and respiratory syndrome virus; identical to SEQ ID NO: 15

SEQ ID NO: 222 - protein, 34 aa, Porcine reproductive and respiratory syndrome virus; identical to SEQ ID NO: 213

SEQ ID NO: 223 - protein, 34 aa, Porcine reproductive and respiratory syndrome virus
LVNANSNSSSHLQLIYNLTLCELNGTDWLANRFD

SEQ ID NO: 224 - protein, 34 aa, Porcine reproductive and respiratory syndrome virus; identical to SEQ ID NO: 223

SEQ ID NO: 225 - protein, 34 aa, Porcine reproductive and respiratory syndrome virus; identical to SEQ ID NO: 223

SEQ ID NO: 226 - protein, 34 aa, Porcine reproductive and respiratory syndrome virus
LVNANSNSSSHLQLIYNLTLCELNGTDWLADRFD

SEQ ID NO: 227 - protein, 34 aa, Porcine reproductive and respiratory syndrome virus
LVNANSNSSSHFQSIYNLTLCELNGTDWLADKFD

SEQ ID NO: 228 - protein, 34 aa, Porcine reproductive and respiratory syndrome virus
LVNANSNNSSHFQSIYNLTLCELNGTDWLANKFD

SEQ ID NO: 229 - protein, 34 aa, Porcine reproductive and respiratory syndrome virus
LVNASSNSSSHFQLIYNLTLCELNGTDWLANKFD

SEQ ID NO: 230 - protein, 34 aa, Porcine reproductive and respiratory syndrome virus
LVNASSTSSSHFQLIYNLTLCELNGTDWLANKFD

SEQ ID NO: 231 - protein, 34 aa, Porcine reproductive and respiratory syndrome virus; identical to SEQ ID NO: 230

SEQ ID NO: 232 - protein, 34 aa, Porcine reproductive and respiratory syndrome virus; identical to SEQ ID NO: 188

SEQ ID NO: 233 - protein, 34 aa, Porcine reproductive and respiratory syndrome virus; identical to SEQ ID NO: 188

SEQ ID NO: 234 - protein, 34 aa, Porcine reproductive and respiratory syndrome virus; identical to SEQ ID NO: 188

SEQ ID NO: 235 - protein, 34 aa, Porcine reproductive and respiratory syndrome virus
SFADGNGNNSTYQYIYNLTICELNGTNWLSGHFD

SEQ ID NO: 236 - protein, 34 aa, Porcine reproductive and respiratory syndrome virus
LANANNDSSSHLQLIYNLTLCELNGTDWLANKFD

SEQ ID NO: 237 - protein, 34 aa, Porcine reproductive and respiratory syndrome virus
SFADGSGNSSTYQYIYNLTICELNGTDWLSNHFS

SEQ ID NO: 238 - protein, 34 aa, Porcine reproductive and respiratory syndrome virus
SFADGNGNNSTYQYIYNLTICELNGTNWLSGHFE

SEQ ID NO: 239 - protein, 34 aa, Porcine reproductive and respiratory syndrome virus
SFVDGNGINSTYQYIYNLTICELNGTNWLSDHFE

SEQ ID NO: 240 - protein, 34 aa, Porcine reproductive and respiratory syndrome virus
SFVDGNGINSTYQYIYDLTICELNGTNWLSDHFE

SEQ ID NO: 241 - protein, 34 aa, Porcine reproductive and respiratory syndrome virus
SFADGNGNNSIYQYIYNLTVCELNGTNWLSDHFE

SEQ ID NO: 242 - protein, 33 aa, Porcine reproductive and respiratory syndrome virus
FADGNGINSTYQYIYNLTICELNGTNWLSNHFE

SEQ ID NO: 243 - protein, 34 aa, Porcine reproductive and respiratory syndrome virus
SFADGNGNNSTYQYIYNLTICELNGTDWLSGHFD

SEQ ID NO: 244 - protein, 33 aa, Porcine reproductive and respiratory syndrome virus
FADGNNINSTYQYIYNLTICELNGTNWLSDHFE

SEQ ID NO: 245 - protein, 34 aa, Porcine reproductive and respiratory syndrome virus
SFADGNGNNSTYQYIYNLTICELNGTNWLSAHFE

SEQ ID NO: 246 - protein, 33 aa, Porcine reproductive and respiratory syndrome virus
FADGNGINSTYQYIYNLTICELNGTNWLSDHFE

SEQ ID NO: 247 - protein, 34 aa, Porcine reproductive and respiratory syndrome virus; identical to SEQ ID NO: 245

SEQ ID NO: 248 - protein, 34 aa, Porcine reproductive and respiratory syndrome virus
SFADGNGNNSTYQYIYNLTICELNGTYWLSAHFE

SEQ ID NO: 249 - protein, 34 aa, Porcine reproductive and respiratory syndrome virus
SSADGNGNSSTYQYIYNLTICELNGTGWLSAHFE

SEQ ID NO: 250 - protein, 34 aa, Porcine reproductive and respiratory syndrome virus
SFADGNGNNSTYQYIYNLTICELNGTNWLSDHFE

SEQ ID NO: 251 - protein, 34 aa, Porcine reproductive and respiratory syndrome virus
SFADGNGNNSTYQYIYNLTICELNGTAWLSGHFD

SEQ ID NO: 252 - protein, 34 aa, Porcine reproductive and respiratory syndrome virus
SSADGNGNSSTYQYIYNSTICELNGTGWLSDHFE

SEQ ID NO: 253 - protein, 34 aa, Porcine reproductive and respiratory syndrome virus
LANASDDSSSHLQLIYNLTLCELNGTDWLANKFD

SEQ ID NO: 254 - protein, 34 aa, Porcine reproductive and respiratory syndrome virus
LVNANGNSSSNLQLIYNLTLCELNGTDWLANKFD

SEQ ID NO: 255 - protein, 34 aa, Porcine reproductive and respiratory syndrome virus
IVNATSNSSSHFQLIYNLTLCELNGTDWLVNKFD

SEQ ID NO: 256 - protein, 34 aa, Porcine reproductive and respiratory syndrome virus
LANASSDSSSHLQLIYNLTLCELNGTDWLANKFD

SEQ ID NO: 257 - protein, 34 aa, Porcine reproductive and respiratory syndrome virus; identical to SEQ ID NO: 31

SEQ ID NO: 258 - protein, 34 aa, Porcine reproductive and respiratory syndrome virus
SFADGNGNSSTYQYIYNLTICELNGTRWLSSHFD

SEQ ID NO: 259 - protein, 34 aa, Porcine reproductive and respiratory syndrome virus
SFADGNGNSSTYQYIYDLTICELNGTRWLSSHFD

SEQ ID NO: 260 - protein, 34 aa, Porcine reproductive and respiratory syndrome virus
SFVDGNDNSSTYQYIYNLTICELNGTAWLSSHFD

SEQ ID NO: 261 - protein, 34 aa, Porcine reproductive and respiratory syndrome virus
SSVDGNGSSSTRQYIYNLTICELNGTEWLSGHFD

SEQ ID NO: 262 - protein, 34 aa, Porcine reproductive and respiratory syndrome virus
SFADGNGNSSTYQYIYNLTICELNGTDWLTNHFD

SEQ ID NO: 263 - protein, 34 aa, Porcine reproductive and respiratory syndrome virus; identical to SEQ ID NO: 262

SEQ ID NO: 264 - protein, 34 aa, Porcine reproductive and respiratory syndrome virus; identical to SEQ ID NO: 15

SEQ ID NO: 265 - protein, 34 aa, Porcine reproductive and respiratory syndrome virus; identical to SEQ ID NO: 47

SEQ ID NO: 266 - protein, 34 aa, Porcine reproductive and respiratory syndrome virus; identical to SEQ ID NO: 47

SEQ ID NO: 267 - protein, 34 aa, Porcine reproductive and respiratory syndrome virus
LVNANSNSSSHLQLIYNLTICELNGTDWLNNHFS

SEQ ID NO: 268 - protein, 34 aa, Porcine reproductive and respiratory syndrome virus
SFADGNGNSSTYQYIYNLTICELNGTQWLSDQFS

SEQ ID NO: 269 - protein, 34 aa, Porcine reproductive and respiratory syndrome virus
SFADGNGNSSTYQYIYNLTICELNGTGWLSNHFD

SEQ ID NO: 270 - protein, 34 aa, Porcine reproductive and respiratory syndrome virus; identical to SEQ ID NO: 31

SEQ ID NO: 271 - protein, 34 aa, Porcine reproductive and respiratory syndrome virus
SFADGNGNGSTYQYIYNLTICELNGTNWLSDHFD

SEQ ID NO: 272 - protein, 34 aa, Porcine reproductive and respiratory syndrome virus
SFADGNGNSSTYQYIYNLTICELNGTDWLSKHFD

SEQ ID NO: 273 - protein, 34 aa, Porcine reproductive and respiratory syndrome virus; identical to SEQ ID NO: 272

SEQ ID NO: 274 - protein, 34 aa, Porcine reproductive and respiratory syndrome virus
SFADGNGNSSTYQYIYNLTICELNGTDWLSSHFD

SEQ ID NO: 275 - protein, 34 aa, Porcine reproductive and respiratory syndrome virus
SFADGNGNSSTYQYIYNLTICELNGTDWLSNHFD

SEQ ID NO: 276 - protein, 34 aa, Porcine reproductive and respiratory syndrome virus
SFADGNGNNSTYQYIYNLTICELNGTAWLFGHFD

SEQ ID NO: 277 - protein, 34 aa, Porcine reproductive and respiratory syndrome virus
SFADGNGNNSTYQYIYNLTICELNGTEWLSGHFD

SEQ ID NO: 278 - protein, 34 aa, Porcine reproductive and respiratory syndrome virus
SFADGNGNNSTYQYIYNLTICELNGTEWLSDHFD

SEQ ID NO: 279 - protein, 34 aa, Porcine reproductive and respiratory syndrome virus
SFVDGNDTNSTYQYIYNLTICELNGTNWLSDHFE

SEQ ID NO: 280 - protein, 34 aa, Porcine reproductive and respiratory syndrome virus; identical to SEQ ID NO: 238

SEQ ID NO: 281 - protein, 34 aa, Porcine reproductive and respiratory syndrome virus
LVNANSSSSSHFQLIYNLTLCELNGTEWLANKFD

SEQ ID NO: 282 - protein, 34 aa, Porcine reproductive and respiratory syndrome virus
SFADGNGTSSTYQYIYNLTICELKGTDWLSKHFD

SEQ ID NO: 283 - protein, 34 aa, Porcine reproductive and respiratory syndrome virus; identical to SEQ ID NO: 272

SEQ ID NO: 284 - protein, 34 aa, Porcine reproductive and respiratory syndrome virus
SFADGSDNSSTYQYIYNMTICELNGTQWLSGQFD

SEQ ID NO: 285 - protein, 34 aa, Porcine reproductive and respiratory syndrome virus; identical to SEQ ID NO: 284

SEQ ID NO: 286 - protein, 34 aa, Porcine reproductive and respiratory syndrome virus
SFADGNGNSSTYQYIYNLTICELNGISWLPNHFN

SEQ ID NO: 287 - protein, 34 aa, Porcine reproductive and respiratory syndrome virus
SFADGNGNSSTYQYIYNLTICELNGTAWLSGHFD

SEQ ID NO: 288 - protein, 34 aa, Porcine reproductive and respiratory syndrome virus
SFADGNGNSSTYLYIYNLTICELNGTAWLSEHFD

SEQ ID NO: 289 - protein, 34 aa, Porcine reproductive and respiratory syndrome virus
SFADGNGNSSTYQYIYNLTICELNGTTWLQHHFD

SEQ ID NO: 290 - protein, 34 aa, Porcine reproductive and respiratory syndrome virus; identical to SEQ ID NO: 272

SEQ ID NO: 291 - protein, 34 aa, Porcine reproductive and respiratory syndrome virus
SFADGNGNSSTYQYIYNLTICELNETAWLSGHFD

SEQ ID NO: 292 - protein, 34 aa, Porcine reproductive and respiratory syndrome virus
SFADGNGNSSTYQYIYNLTICELNGTSWLSNHFD

SEQ ID NO: 293 - protein, 34 aa, Porcine reproductive and respiratory syndrome virus
SFAVGSGNSSTYQYIYNLTICELNGTAWLHGHFA

SEQ ID NO: 294 - protein, 34 aa, Porcine reproductive and respiratory syndrome virus
SFADGNDNSSTYQYIYNMTICELNGTDWLSGHFD

SEQ ID NO: 295 - protein, 34 aa, Porcine reproductive and respiratory syndrome virus
SSADGNGNSSTYQYIYNLTICELNGTTWLSEHFH

SEQ ID NO: 296 - protein, 34 aa, Porcine reproductive and respiratory syndrome virus
SFADGNGSSSTYQYIYNLTICELNGTSWLSDHFD

SEQ ID NO: 297 - protein, 34 aa, Porcine reproductive and respiratory syndrome virus
SFADGNGNSSTYQYIYNLTICELNGTAWLSSHFS

SEQ ID NO: 298 - protein, 34 aa, Porcine reproductive and respiratory syndrome virus
SFADGNGNSSTYQYIYNLTICELNGTDWLSDHFD

SEQ ID NO: 299 - protein, 34 aa, Porcine reproductive and respiratory syndrome virus
SFADGNGNSSTYLYIYNLTICELNETAWLSEHFD

SEQ ID NO: 300 - protein, 34 aa, Porcine reproductive and respiratory syndrome virus
SFADGNGDSSIYLYIYNLTICELNETAWLSEHFD

SEQ ID NO: 301 - protein, 34 aa, Porcine reproductive and respiratory syndrome virus; identical to SEQ ID NO: 299

SEQ ID NO: 302 - protein, 34 aa, Porcine reproductive and respiratory syndrome virus; identical to SEQ ID NO: 300

SEQ ID NO: 303 - protein, 34 aa, Porcine reproductive and respiratory syndrome virus; identical to SEQ ID NO: 287

SEQ ID NO: 304 - protein, 34 aa, Porcine reproductive and respiratory syndrome virus
SFADGNGNSSTYQYIYDLTICELNGTGWLSNHFD

SEQ ID NO: 305 - protein, 34 aa, Porcine reproductive and respiratory syndrome virus
SFADGNGNSLTYQYIYDLTICELNGTGWLSNHFD

SEQ ID NO: 306 - protein, 34 aa, Porcine reproductive and respiratory syndrome virus; identical to SEQ ID NO: 269

SEQ ID NO: 307 - protein, 34 aa, Porcine reproductive and respiratory syndrome virus
SFADGNGNSSTYQYIYDLTICELNGTGWLFGHFD

SEQ ID NO: 308 - protein, 34 aa, Porcine reproductive and respiratory syndrome virus
SFADGNGNSSTYQYIYNLTICELNGTAWLSNHFN

SEQ ID NO: 309 - protein, 34 aa, Porcine reproductive and respiratory syndrome virus
SFADGNGNSSTYQYIYNLTICELNGTGWLFGHFD

SEQ ID NO: 310 - protein, 34 aa, Porcine reproductive and respiratory syndrome virus
SFADGNGNGSTYQYIYNLTICELNGTDWLSSHFN

SEQ ID NO: 311 - protein, 34 aa, Porcine reproductive and respiratory syndrome virus
SFADGNGDSSTYQYIYDLTICELNGTGWLSNHFD

SEQ ID NO: 312 - protein, 34 aa, Porcine reproductive and respiratory syndrome virus; identical to SEQ ID NO: 272

SEQ ID NO: 313 - protein, 34 aa, Porcine reproductive and respiratory syndrome virus
SFADGNGNSSTYQYIYDLTICELNGTAWLQNHFS

SEQ ID NO: 314 - protein, 34 aa, Porcine reproductive and respiratory syndrome virus
SFADGNGNSSTYQYIYNLTICELNGTDWLSGGFD

SEQ ID NO: 315 - protein, 34 aa, Porcine reproductive and respiratory syndrome virus
SFADGNDNSSTYQYIYNLTICELNGTGWLSNHFD

SEQ ID NO: 316 - protein, 34 aa, Porcine reproductive and respiratory syndrome virus
SFAECNGDSSTYQYIYDLTICELNETAWLSGHFD

SEQ ID NO: 317 - protein, 34 aa, Porcine reproductive and respiratory syndrome virus
SFAECNGNSSTYQYIYDLTICELNETAWLSGHFD

SEQ ID NO: 318 - protein, 34 aa, Porcine reproductive and respiratory syndrome virus; identical to SEQ ID NO: 317

SEQ ID NO: 319 - protein, 33 aa, Porcine reproductive and respiratory syndrome virus
FAECNGNGSTYQYIYNLTICELNGTNWLSNNFD

SEQ ID NO: 320 - protein, 34 aa, Porcine reproductive and respiratory syndrome virus; identical to SEQ ID NO: 269

SEQ ID NO: 321 - protein, 34 aa, Porcine reproductive and respiratory syndrome virus; identical to SEQ ID NO: 287

SEQ ID NO: 322 - protein, 34 aa, Porcine reproductive and respiratory syndrome virus
SFADGNGNSSTYQYIYNLTICELNGTDWLVSHFD

SEQ ID NO: 323 - protein, 34 aa, Porcine reproductive and respiratory syndrome virus
SFADGNGNSSTYQYIYNLTICELNGTEWLSTHFV

SEQ ID NO: 324 - protein, 34 aa, Porcine reproductive and respiratory syndrome virus; identical to SEQ ID NO: 31

SEQ ID NO: 325 - protein, 34 aa, Porcine reproductive and respiratory syndrome virus; identical to SEQ ID NO: 262

SEQ ID NO: 326 - protein, 34 aa, Porcine reproductive and respiratory syndrome virus
SFADGNGNSSTFQYIYNLTICELNGTDWLAGHFD

SEQ ID NO: 327 - protein, 34 aa, Porcine reproductive and respiratory syndrome virus
SSADGNGSSSTYQYIYNLTICELNGTDWLASHFD

SEQ ID NO: 328 - protein, 34 aa, Porcine reproductive and respiratory syndrome virus
SFADGNGNSSTYQYIYNLTICELNGTHWLTSHFD

SEQ ID NO: 329 - protein, 34 aa, Porcine reproductive and respiratory syndrome virus
SFADGNGNSSTYQYIYNLTICELNGTDWLASHFD

SEQ ID NO: 330 - protein, 33 aa, Porcine reproductive and respiratory syndrome virus
FADGNGNSSTYQSIYNLTICELNGTGWLTSHFD

SEQ ID NO: 331 - protein, 34 aa, Porcine reproductive and respiratory syndrome virus
SFADGNGNSSTYQYIYDLTICELNGTGWLSNHFS

SEQ ID NO: 332 - protein, 34 aa, Porcine reproductive and respiratory syndrome virus
SFVDGNDNSSTYQYIYNLTICELNGTAWLSNHFY

SEQ ID NO: 333 - protein, 34 aa, Porcine reproductive and respiratory syndrome virus; identical to SEQ ID NO: 331

SEQ ID NO: 334 - protein, 34 aa, Porcine reproductive and respiratory syndrome virus; identical to SEQ ID NO: 331

SEQ ID NO: 335 - protein, 34 aa, Porcine reproductive and respiratory syndrome virus
SFAVGSGNSSTRQYIYNLTICELNGTTWLSSHFD

SEQ ID NO: 336 - protein, 34 aa, Porcine reproductive and respiratory syndrome virus
SFADGNGNSSTYQYIYNLTICELNGTEWLSSHFD

SEQ ID NO: 337 - protein, 34 aa, Porcine reproductive and respiratory syndrome virus; identical to SEQ ID NO: 336

SEQ ID NO: 338 - protein, 34 aa, Porcine reproductive and respiratory syndrome virus; identical to SEQ ID NO: 31

SEQ ID NO: 339 - protein, 33 aa, Porcine reproductive and respiratory syndrome virus
FVYGNDNSSTYQYIYNLTICELNGTSWLSTHFS

SEQ ID NO: 340 - protein, 34 aa, Porcine reproductive and respiratory syndrome virus
SFADGNGNSSTYQYIYNLTICELNGTAWLFNHFD

SEQ ID NO: 341 - protein, 34 aa, Porcine reproductive and respiratory syndrome virus
SFADGNGNSSTYQYIYNLTICELNGTGWLSNHFE

SEQ ID NO: 342 - protein, 34 aa, Porcine reproductive and respiratory syndrome virus; identical to SEQ ID NO: 143

SEQ ID NO: 343 - protein, 34 aa, Porcine reproductive and respiratory syndrome virus; identical to SEQ ID NO: 31

SEQ ID NO: 344 - protein, 34 aa, Porcine reproductive and respiratory syndrome virus; identical to SEQ ID NO: 22

SEQ ID NO: 345 - protein, 34 aa, Porcine reproductive and respiratory syndrome virus; identical to SEQ ID NO: 39

SEQ ID NO: 346 - protein, 34 aa, Porcine reproductive and respiratory syndrome virus; identical to SEQ ID NO: 58

SEQ ID NO: 347 - protein, 34 aa, Porcine reproductive and respiratory syndrome virus; identical to SEQ ID NO: 55

SEQ ID NO: 348 - protein, 34 aa, Porcine reproductive and respiratory syndrome virus; identical to SEQ ID NO: 58

SEQ ID NO: 349 - protein, 34 aa, Porcine reproductive and respiratory syndrome virus
  MISC_FEATURE (17)..(17)
LVNADSNSSSHLQLIYXLTICELNGTDWLNNHFS

SEQ ID NO: 350 - protein, 34 aa, Porcine reproductive and respiratory syndrome virus
LVNASSNSSSHLQLIYNLTICELNGTDWLNDHFS

SEQ ID NO: 351 - protein, 34 aa, Porcine reproductive and respiratory syndrome virus; identical to SEQ ID NO: 64

SEQ ID NO: 352 - protein, 34 aa, Porcine reproductive and respiratory syndrome virus
LVNANSNSSSHLQLIYNLTLCELNGTDWLAGNFD

SEQ ID NO: 353 - protein, 34 aa, Porcine reproductive and respiratory syndrome virus
LVNANSNSSSHFQLIYNLTLCELNGTEWLAKKFD

SEQ ID NO: 354 - protein, 34 aa, Porcine reproductive and respiratory syndrome virus; identical to SEQ ID NO: 353

SEQ ID NO: 355 - protein, 34 aa, Porcine reproductive and respiratory syndrome virus
LVNANSNSSSHFQLIYNLTLCELNGTEWLANKFD

SEQ ID NO: 356 - protein, 34 aa, Porcine reproductive and respiratory syndrome virus
LANANSTSSSHFQLIYNLTICELNGTDWLANKFD

SEQ ID NO: 357 - protein, 34 aa, Porcine reproductive and respiratory syndrome virus
LVSANSNSSSHLQLIYNLTLCELNGTDWLADKFD

SEQ ID NO: 358 - protein, 34 aa, Porcine reproductive and respiratory syndrome virus
LVNANSTSSSQLQLIYNLTLCELNGTDWLANKFD

SEQ ID NO: 359 - protein, 34 aa, Porcine reproductive and respiratory syndrome virus; identical to SEQ ID NO: 47

SEQ ID NO: 360 - protein, 34 aa, Porcine reproductive and respiratory syndrome virus
LVNASSNSSSHLQLIYNLTICELNGTDWLNDKFD

SEQ ID NO: 361 - protein, 34 aa, Porcine reproductive and respiratory syndrome virus
LVDASSNSSSHLQLIYNLTICELNGTDWLNNKFD

SEQ ID NO: 362 - protein, 34 aa, Porcine reproductive and respiratory syndrome virus
LVNAGSNSSSHLQLIYNLTICELNGTDWLNDKFD

SEQ ID NO: 363 - protein, 34 aa, Porcine reproductive and respiratory syndrome virus
LVNANSNSGSHLQLIYNLTLCELNGTDWLKDKFD

SEQ ID NO: 364 - protein, 34 aa, Porcine reproductive and respiratory syndrome virus
LVNANNDSSSHLQLIYSLTICELNGTEWLNEHFS

SEQ ID NO: 365 - protein, 34 aa, Porcine reproductive and respiratory syndrome virus
SFVDGNDSSSTYQYIYNLTICELNGTEWLPTHFD

SEQ ID NO: 366 - protein, 34 aa, Porcine reproductive and respiratory syndrome virus
SFADGNGNSSTYQYIYNLTICELNGTAWLSTHFD

SEQ ID NO: 367 - protein, 34 aa, Porcine reproductive and respiratory syndrome virus; identical to SEQ ID NO: 366

SEQ ID NO: 368 - protein, 34 aa, Porcine reproductive and respiratory syndrome virus
SFADGNGNSSTYQYIYDLTLCELNGTDWLSDHFE

SEQ ID NO: 369 - protein, 34 aa, Porcine reproductive and respiratory syndrome virus
SFADGNGNSSTYQYIYNLTLCELNGTDWLSGHFE

SEQ ID NO: 370 - protein, 34 aa, Porcine reproductive and respiratory syndrome virus
SFADGNGNSSTYQYIYNLTICELNGTEWLSSHFS

SEQ ID NO: 371 - protein, 34 aa, Porcine reproductive and respiratory syndrome virus; identical to SEQ ID NO: 370

SEQ ID NO: 372 - protein, 34 aa, Porcine reproductive and respiratory syndrome virus
SFADGNNDSSTYQYIYNLTICELNGTAWLFDHFD

SEQ ID NO: 373 - protein, 34 aa, Porcine reproductive and respiratory syndrome virus
SFANGNGNSSTYQFIYNMTICELNGTDWLSNNFN

SEQ ID NO: 374 - protein, 34 aa, Porcine reproductive and respiratory syndrome virus; identical to SEQ ID NO: 31

SEQ ID NO: 375 - protein, 34 aa, Porcine reproductive and respiratory syndrome virus
SFADGNGNSSTFQYIYNLTVCELNGTDWLSGHFS

SEQ ID NO: 376 - protein, 34 aa, Porcine reproductive and respiratory syndrome virus; identical to SEQ ID NO: 375

SEQ ID NO: 377 - protein, 32 aa, Porcine reproductive and respiratory syndrome virus
AAANGNSSTLQYIYNLTICELNGTDWLVGKFD

SEQ ID NO: 378 - protein, 34 aa, Porcine reproductive and respiratory syndrome virus
SFADGNGNSSTYQYIYNLTICELNGTEWLSSNFY

SEQ ID NO: 379 - protein, 34 aa, Porcine reproductive and respiratory syndrome virus; identical to SEQ ID NO: 260

SEQ ID NO: 380 - protein, 34 aa, Porcine reproductive and respiratory syndrome virus
SFVDGNDNSSTYQYIYNLTICELNGTAWLSSHFN

SEQ ID NO: 381 - protein, 34 aa, Porcine reproductive and respiratory syndrome virus
SFADGNGNSSTYQYIYNLTICELNGIQWLSDRFY

SEQ ID NO: 382 - protein, 34 aa, Porcine reproductive and respiratory syndrome virus
SFAAANGNSSTHQYIYNLTICELNGTDWLQGKFE

SEQ ID NO: 383 - protein, 34 aa, Porcine reproductive and respiratory syndrome virus
SFADGNGNSSTYQYIYNLTICELNGTAWLFDHFD

SEQ ID NO: 384 - protein, 34 aa, Porcine reproductive and respiratory syndrome virus
SFADGNGNSSTYQYIYNLTICELNGTKWLTSHFD

SEQ ID NO: 385 - protein, 34 aa, Porcine reproductive and respiratory syndrome virus
SFADGNGNSSTYQYIYNLTICELNGTEWLTSHFD

SEQ ID NO: 386 - protein, 34 aa, Porcine reproductive and respiratory syndrome virus
SFADGNGNSSTYQYIYDLTICELNGTNWLASRFS

SEQ ID NO: 387 - protein, 34 aa, Porcine reproductive and respiratory syndrome virus
SFADGNGNSSTYQYIYNLTICELNGTDWLASHFS

SEQ ID NO: 388 - protein, 34 aa, Porcine reproductive and respiratory syndrome virus
SFADGNGNSSTYQYIYNLTICELNGTDWLSGHFD

SEQ ID NO: 389 - protein, 34 aa, Porcine reproductive and respiratory syndrome virus; identical to SEQ ID NO: 287

SEQ ID NO: 390 - protein, 34 aa, Porcine reproductive and respiratory syndrome virus
SFVDGNDDSSTYQYIYNLTICELNGTEWLSSHFD

SEQ ID NO: 391 - protein, 34 aa, Porcine reproductive and respiratory syndrome virus; identical to SEQ ID NO: 26

SEQ ID NO: 392 - protein, 34 aa, Porcine reproductive and respiratory syndrome virus; identical to SEQ ID NO: 23

SEQ ID NO: 393 - protein, 34 aa, Porcine reproductive and respiratory syndrome virus; identical to SEQ ID NO: 390

SEQ ID NO: 394 - protein, 34 aa, Porcine reproductive and respiratory syndrome virus
SFVDGDDNSSTYQYIYNLTICELNGTNWLSSHFD

SEQ ID NO: 395 - protein, 34 aa, Porcine reproductive and respiratory syndrome virus
SFADGNGNSSTYQYIYNLTICELNGTDWLSSHFS

SEQ ID NO: 396 - protein, 34 aa, Porcine reproductive and respiratory syndrome virus; identical to SEQ ID NO: 31

SEQ ID NO: 397 - protein, 34 aa, Porcine reproductive and respiratory syndrome virus
SFADGNGNSSTRQYIYNLTICELNGTTWLTGHFD

SEQ ID NO: 398 - protein, 34 aa, Porcine reproductive and respiratory syndrome virus; identical to SEQ ID NO: 31

SEQ ID NO: 399 - protein, 34 aa, Porcine reproductive and respiratory syndrome virus
SFADGNGNSSTYQYIYNLTICELNGTAWLSSHFD

SEQ ID NO: 400 - protein, 34 aa, Porcine reproductive and respiratory syndrome virus
SFADGSGDSSTYQYIYNLTICELNGTAWLSSHFY

SEQ ID NO: 401 - protein, 34 aa, Porcine reproductive and respiratory syndrome virus; identical to SEQ ID NO: 22

SEQ ID NO: 402 - protein, 34 aa, Porcine reproductive and respiratory syndrome virus
SFADGNGNSSTYQYIYNLTICELNGTKWLSSHFD

SEQ ID NO: 403 - protein, 34 aa, Porcine reproductive and respiratory syndrome virus
SFADGNGNSSTYQYIYNLTICELNGTTWLTSHFD

SEQ ID NO: 404 - protein, 34 aa, Porcine reproductive and respiratory syndrome virus; identical to SEQ ID NO: 213

SEQ ID NO: 405 - protein, 34 aa, Porcine reproductive and respiratory syndrome virus
SFADGNGNSSTYQYIYNLTICELNGTEWLSNHFG

SEQ ID NO: 406 - protein, 34 aa, Porcine reproductive and respiratory syndrome virus
SFADGSGNSSTYQYIYNLTICELNGTKWLSSHFG

SEQ ID NO: 407 - protein, 34 aa, Porcine reproductive and respiratory syndrome virus
SFADGNGNGSTYQYIYNLTICELNGTTWLTSHFD

SEQ ID NO: 408 - protein, 34 aa, Porcine reproductive and respiratory syndrome virus
SFVDGNGNSSTYQYIYNLTICELNGTEWLSSHFD

SEQ ID NO: 409 - protein, 34 aa, Porcine reproductive and respiratory syndrome virus
SFADGNDNSSTYQYIYNLTICELNGTEWLSSHFG

SEQ ID NO: 410 - protein, 34 aa, Porcine reproductive and respiratory syndrome virus
SFVDGSDNSSTYQYIYNLTICELNGTHWLSDHFG

SEQ ID NO: 411 - protein, 34 aa, Porcine reproductive and respiratory syndrome virus
SFADGNGNSSTYLYIYNLTICELNGTLWLSNHFD

SEQ ID NO: 412 - protein, 34 aa, Porcine reproductive and respiratory syndrome virus
SFADGNGNSSTYQYIYNLTICELNGTAWLSSHFE

SEQ ID NO: 413 - protein, 34 aa, Porcine reproductive and respiratory syndrome virus
SFADGNGNSSTYQYIYNLTICELNGTEWLSSHFG

SEQ ID NO: 414 - protein, 34 aa, Porcine reproductive and respiratory syndrome virus
SFADGNGNSSTYQYIYNLTICELNGTEWLASHFD

SEQ ID NO: 415 - protein, 34 aa, Porcine reproductive and respiratory syndrome virus; identical to SEQ ID NO: 399

SEQ ID NO: 416 - protein, 31 aa, Porcine reproductive and respiratory syndrome virus
DGNGNSSTYQYIYNLTICELNGTDWLSTHFD

SEQ ID NO: 417 - protein, 31 aa, Porcine reproductive and respiratory syndrome virus
DGNGNSSTYQYIYNLTICELNGTEWLAIHFD

SEQ ID NO: 418 - protein, 31 aa, Porcine reproductive and respiratory syndrome virus
DGNGNSSTYQYIYNLTICELNGTDWLSNHFG

SEQ ID NO: 419 - protein, 31 aa, Porcine reproductive and respiratory syndrome virus
DGNGNSSTYQYIYNLTICELNGTDWLSDHFV

SEQ ID NO: 420 - protein, 31 aa, Porcine reproductive and respiratory syndrome virus
DGNGNSSTYQYIYDLTICELNGTEWLSSHFD

SEQ ID NO: 421 - protein, 31 aa, Porcine reproductive and respiratory syndrome virus
DGNDNSSTYQYIYKLTICELNGTEWLSSHFD

SEQ ID NO: 422 - protein, 31 aa, Porcine reproductive and respiratory syndrome virus
DGNDNSSTYQYIYKLTICELNGTEWLSNHFD

SEQ ID NO: 423 - protein, 31 aa, Porcine reproductive and respiratory syndrome virus
DGNDSSSTYQYIYNLTICELNGTEWLLSHFD

SEQ ID NO: 424 - protein, 31 aa, Porcine reproductive and respiratory syndrome virus
DGNGNSSTYQYIYNLTICELNGTDWLSSHFV

SEQ ID NO: 425 - protein, 31 aa, Porcine reproductive and respiratory syndrome virus
DGSGNSSTYQYIYNLTICELNGTTWLSGHFD

SEQ ID NO: 426 - protein, 31 aa, Porcine reproductive and respiratory syndrome virus
DGNGNSSTYQYIYNLTICELNGTQWLSGHFD

SEQ ID NO: 427 - protein, 31 aa, Porcine reproductive and respiratory syndrome virus
DGNGNSSTYQYIYNLTICELNGTDWLSDHFG

SEQ ID NO: 428 - protein, 34 aa, Porcine reproductive and respiratory syndrome virus; identical to SEQ ID NO: 256

SEQ ID NO: 429 - protein, 27 aa, Porcine reproductive and respiratory syndrome virus
NSSTYQYIYKLTICELNGTEWLSSHFD

SEQ ID NO: 430 - protein, 27 aa, Porcine reproductive and respiratory syndrome virus
NSSTYQYIYKLTICELNGTEWLSNHFD

SEQ ID NO: 431 - protein, 27 aa, Porcine reproductive and respiratory syndrome virus
NSSTYQYIYNLTICELNGTEWLSNHFD

SEQ ID NO: 432 - protein, 34 aa, Porcine reproductive and respiratory syndrome virus
SFADGNGNSSTYQYIYNLTICELNGTTWLSDHFY

SEQ ID NO: 433 - protein, 34 aa, Porcine reproductive and respiratory syndrome virus; identical to SEQ ID NO: 275

SEQ ID NO: 434 - protein, 34 aa, Porcine reproductive and respiratory syndrome virus
SFADGNGNSSTYQYIYNLTICELNGTAWLSNKFD

SEQ ID NO: 435 - protein, 34 aa, Porcine reproductive and respiratory syndrome virus
SFADGNGNSSTYQYIYNLTICELNGTKWLSGHFD

SEQ ID NO: 436 - protein, 34 aa, Porcine reproductive and respiratory syndrome virus
SSADGNGDSSTYQYIYDLTICELNGTGWLSSHFD

SEQ ID NO: 437 - protein, 34 aa, Porcine reproductive and respiratory syndrome virus
SFADGNGNSSTYQYIYNLTICELNGTKWLSEHFD

SEQ ID NO: 438 - protein, 34 aa, Porcine reproductive and respiratory syndrome virus
SFAEGTGNSSTYQYIYDLTICELNGTGWLSTHFD

SEQ ID NO: 439 - protein, 34 aa, Porcine reproductive and respiratory syndrome virus
SFADGNGNSSTYQYIYNLTICELNGTNWLSGHFD

SEQ ID NO: 440 - protein, 34 aa, Porcine reproductive and respiratory syndrome virus
SFADGNGNSSTYQYIYNLTICELNGTDWLSNHFY

SEQ ID NO: 441 - protein, 32 aa, Porcine reproductive and respiratory syndrome virus
ADGNGNSSTYQYIYNLTICELNGTQWLSAHFS

SEQ ID NO: 442 - protein, 34 aa, Porcine reproductive and respiratory syndrome virus
SFADGNGNSSTYQYIYKLTICELNGTAWLSNHFY

SEQ ID NO: 443 - protein, 34 aa, Porcine reproductive and respiratory syndrome virus; identical to SEQ ID NO: 188

SEQ ID NO: 444 - protein, 34 aa, Porcine reproductive and respiratory syndrome virus
FVSANNNSSSHLQLIYNLTLCELNGTDWLANKFD

SEQ ID NO: 445 - protein, 34 aa, Porcine reproductive and respiratory syndrome virus
LVSASTNSSSHLQLIYNLTLCELNGTDWLANKFD

SEQ ID NO: 446 - protein, 33 aa, Porcine reproductive and respiratory syndrome virus
VNANSDSSSHFQLIYNLTLCELNGTDWLANKFD

SEQ ID NO: 447 - protein, 34 aa, Porcine reproductive and respiratory syndrome virus; identical to SEQ ID NO: 44

SEQ ID NO: 448 - protein, 34 aa, Porcine reproductive and respiratory syndrome virus
IVNATGNSSSHFQLIYNLTLCELNGTDWLANKFD

SEQ ID NO: 449 - protein, 34 aa, Porcine reproductive and respiratory syndrome virus
LVNASSNNSSHLQLIYNLTICELNGTDWLDKHFS

SEQ ID NO: 450 - protein, 34 aa, Porcine reproductive and respiratory syndrome virus
LVNADNSSSSHLQLIYNLTICELNGTDWLNEKFD

SEQ ID NO: 451 - protein, 34 aa, Porcine reproductive and respiratory syndrome virus
IVNANSNSSSHIQLIYNLTLCELNGTDWLAGKFD

SEQ ID NO: 452 - protein, 34 aa, Porcine reproductive and respiratory syndrome virus
LVNASSNRSSHLQLIYNLTLCELNGTDWLKDKFD

SEQ ID NO: 453 - protein, 34 aa, Porcine reproductive and respiratory syndrome virus
IVNASGNSSSHFQLIYNLTLCELNGTDWLAKKFD

SEQ ID NO: 454 - protein, 34 aa, Porcine reproductive and respiratory syndrome virus; identical to SEQ ID NO: 75

SEQ ID NO: 455 - protein, 34 aa, Porcine reproductive and respiratory syndrome virus; identical to SEQ ID NO: 47

SEQ ID NO: 456 - protein, 34 aa, Porcine reproductive and respiratory syndrome virus
LVNASSNSSSHLQLIYNLTICELNGTDWLNNTFD

SEQ ID NO: 457 - protein, 34 aa, Porcine reproductive and respiratory syndrome virus
LVNANSNSSSHLQLIYNLTLCELNGTEWLSEKFD

SEQ ID NO: 458 - protein, 34 aa, Porcine reproductive and respiratory syndrome virus; identical to SEQ ID NO: 47

SEQ ID NO: 459 - protein, 34 aa, Porcine reproductive and respiratory syndrome virus
IVNANSNSSSHFQLIYNLTICELNGTDWLKQKFD

SEQ ID NO: 460 - protein, 34 aa, Porcine reproductive and respiratory syndrome virus
IVNANSNSSSHFQLIYDLTICELNGTDWLSQKFD

SEQ ID NO: 461 - protein, 34 aa, Porcine reproductive and respiratory syndrome virus
LVNANSNSSSHLQLIYNLTICELNGTDWLNSHFS

SEQ ID NO: 462 - protein, 34 aa, Porcine reproductive and respiratory syndrome virus
LVNASNGSSSHLQLIYNLTLCELNGTDWLANKFD

SEQ ID NO: 463 - protein, 34 aa, Porcine reproductive and respiratory syndrome virus
LVDADSNSSSHFQLIYNLTLCELNGTDWLKDKFD

SEQ ID NO: 464 - protein, 34 aa, Porcine reproductive and respiratory syndrome virus
LVNANSSSSSHFQLIYNLTLCELNGTDWLGNKFD

SEQ ID NO: 465 - protein, 34 aa, Porcine reproductive and respiratory syndrome virus
LVGANSNSSSHFQLIYNLTLCELNGTDWLGDKFD

SEQ ID NO: 466 - protein, 34 aa, Porcine reproductive and respiratory syndrome virus
LVGANSNSSSHFQLIYNLTLCELNGTDWLGNKFD

SEQ ID NO: 467 - protein, 34 aa, Porcine reproductive and respiratory syndrome virus
LVGANSNSSSHFQLIYNLTLCELNGTDWLNDKFS

SEQ ID NO: 468 - protein, 34 aa, Porcine reproductive and respiratory syndrome virus
LVNANSNSSSHLQLIYNLTICELNGTEWLGNHFS

SEQ ID NO: 469 - protein, 34 aa, Porcine reproductive and respiratory syndrome virus
LVNASNNSSSHLQLIYNLTICELNGTDWLDKHFS

SEQ ID NO: 470 - protein, 34 aa, Porcine reproductive and respiratory syndrome virus
LVNANSNSSSHLQLIYNLTLCELNGTDWLKDKFN

SEQ ID NO: 471 - protein, 34 aa, Porcine reproductive and respiratory syndrome virus; identical to SEQ ID NO: 188

SEQ ID NO: 472 - protein, 34 aa, Porcine reproductive and respiratory syndrome virus; identical to SEQ ID NO: 188

SEQ ID NO: 473 - protein, 34 aa, Porcine reproductive and respiratory syndrome virus
LVNANSSSSSHLQLIYNLTLCELNGTDWLKDKFD

SEQ ID NO: 474 - protein, 34 aa, Porcine reproductive and respiratory syndrome virus
LVNASSNSSSHLQLIYNLTLCELNGTDWLKGKFD

SEQ ID NO: 475 - protein, 34 aa, Porcine reproductive and respiratory syndrome virus
LVNASSNSSSHLQLIYNLTLCELNGTDWLKDKFD

SEQ ID NO: 476 - protein, 34 aa, Porcine reproductive and respiratory syndrome virus
LVNANSNSSSHLQLIYNLTLCELNGTDWLKGKFD

SEQ ID NO: 477 - protein, 34 aa, Porcine reproductive and respiratory syndrome virus
LVGADSNSSSHFQLIYNLTLCELNGTDWLSDKFD

SEQ ID NO: 478 - protein, 34 aa, Porcine reproductive and respiratory syndrome virus; identical to SEQ ID NO: 188

SEQ ID NO: 479 - protein, 34 aa, Porcine reproductive and respiratory syndrome virus; identical to SEQ ID NO: 475

SEQ ID NO: 480 - protein, 34 aa, Porcine reproductive and respiratory syndrome virus
PANAGNNSSSHLQLIYNLTLCELNGTDWLADKFD

SEQ ID NO: 481 - protein, 34 aa, Porcine reproductive and respiratory syndrome virus
IVNANSNSSSQFQLIYNLTICELNGTDWLADKFD

SEQ ID NO: 482 - protein, 34 aa, Porcine reproductive and respiratory syndrome virus
LVNADSNNSSHLQLIYNLTICELNGTDWLDNHFS

SEQ ID NO: 483 - protein, 34 aa, Porcine reproductive and respiratory syndrome virus
IVNANSNSSSHFQLIYNLTICELNGTDWLNHKFD

SEQ ID NO: 484 - protein, 34 aa, Porcine reproductive and respiratory syndrome virus
LANASNNSSSHLQLIYNLTLCELNGTDWLADKFD

SEQ ID NO: 485 - protein, 34 aa, Porcine reproductive and respiratory syndrome virus
LVNASSNSSSHFQLIYNLTICELNGTDWLNKKFD

SEQ ID NO: 486 - protein, 34 aa, Porcine reproductive and respiratory syndrome virus
LVNADSNSSSHLQLIYNLTICELNGTDWLNNHFS

SEQ ID NO: 487 - protein, 34 aa, Porcine reproductive and respiratory syndrome virus
LVNADSNSSSHLQLIYNLTICELNGTEWLNNHFS

SEQ ID NO: 488 - protein, 34 aa, Porcine reproductive and respiratory syndrome virus
LVNANSNSSSHLQLIYNLTLCELNGTDWLKNRFD

SEQ ID NO: 489 - protein, 34 aa, Porcine reproductive and respiratory syndrome virus; identical to SEQ ID NO: 267

SEQ ID NO: 490 - protein, 34 aa, Porcine reproductive and respiratory syndrome virus; identical to SEQ ID NO: 267

SEQ ID NO: 491 - protein, 34 aa, Porcine reproductive and respiratory syndrome virus
LVNANSNSSSHFQLIYNLTLCELNGTDWLADRFD

SEQ ID NO: 492 - protein, 34 aa, Porcine reproductive and respiratory syndrome virus; identical to SEQ ID NO: 55

SEQ ID NO: 493 - protein, 34 aa, Porcine reproductive and respiratory syndrome virus
LVNASNSSSSHLQLIYNLTLCELNGTDWLANKFD

SEQ ID NO: 494 - protein, 34 aa, Porcine reproductive and respiratory syndrome virus
FVNADSNSSSHLQLIYNLTLCELNGTDWLAQRFD

SEQ ID NO: 495 - protein, 34 aa, Porcine reproductive and respiratory syndrome virus
LVNASNSSSSHLQLIYNLTICELNGTDWLSHKFD

SEQ ID NO: 496 - protein, 34 aa, Porcine reproductive and respiratory syndrome virus; identical to SEQ ID NO: 47

SEQ ID NO: 497 - protein, 34 aa, Porcine reproductive and respiratory syndrome virus; identical to SEQ ID NO: 55

SEQ ID NO: 498 - protein, 34 aa, Porcine reproductive and respiratory syndrome virus
LVNANSASSSHFQLIYNLTLCELNGTDWLNDKFS

SEQ ID NO: 499 - protein, 34 aa, Porcine reproductive and respiratory syndrome virus
LVNADSNNSSHLQLIYNLTICELNGTDWLNNHFS

SEQ ID NO: 500 - protein, 34 aa, Porcine reproductive and respiratory syndrome virus; identical to SEQ ID NO: 475

SEQ ID NO: 501 - protein, 34 aa, Porcine reproductive and respiratory syndrome virus
LVNANSNSSSHFQLIYNLTICELNGTDWLNKKFD

SEQ ID NO: 502 - protein, 34 aa, Porcine reproductive and respiratory syndrome virus
LVNANSNSSSHLQLIYNLTLCELNGTDWLADKFD

SEQ ID NO: 503 - protein, 34 aa, Porcine reproductive and respiratory syndrome virus; identical to SEQ ID NO: 502

SEQ ID NO: 504 - protein, 34 aa, Porcine reproductive and respiratory syndrome virus; identical to SEQ ID NO: 47

SEQ ID NO: 505 - protein, 34 aa, Porcine reproductive and respiratory syndrome virus; identical to SEQ ID NO: 502

SEQ ID NO: 506 - protein, 34 aa, Porcine reproductive and respiratory syndrome virus; identical to SEQ ID NO: 502

SEQ ID NO: 507 - protein, 34 aa, Porcine reproductive and respiratory syndrome virus; identical to SEQ ID NO: 502

SEQ ID NO: 508 - protein, 34 aa, Porcine reproductive and respiratory syndrome virus
LANASHNSSSHLQLIYNLTLCELNGTDWLANKFD

SEQ ID NO: 509 - protein, 34 aa, Porcine reproductive and respiratory syndrome virus
LVNANSSSSSHLQLIYNLTLCELNGTDWLKNKFD

SEQ ID NO: 510 - protein, 34 aa, Porcine reproductive and respiratory syndrome virus; identical to SEQ ID NO: 68

SEQ ID NO: 511 - protein, 34 aa, Porcine reproductive and respiratory syndrome virus; identical to SEQ ID NO: 188

SEQ ID NO: 512 - protein, 34 aa, Porcine reproductive and respiratory syndrome virus; identical to SEQ ID NO: 188

SEQ ID NO: 513 - protein, 34 aa, Porcine reproductive and respiratory syndrome virus
LVNANSNSSSHLQLIYNLTLCELNGTDWLKNKFD

SEQ ID NO: 514 - protein, 34 aa, Porcine reproductive and respiratory syndrome virus; identical to SEQ ID NO: 188

SEQ ID NO: 515 - protein, 34 aa, Porcine reproductive and respiratory syndrome virus; identical to SEQ ID NO: 467

SEQ ID NO: 516 - protein, 34 aa, Porcine reproductive and respiratory syndrome virus; identical to SEQ ID NO: 470

SEQ ID NO: 517 - protein, 34 aa, Porcine reproductive and respiratory syndrome virus; identical to SEQ ID NO: 188

SEQ ID NO: 518 - protein, 34 aa, Porcine reproductive and respiratory syndrome virus; identical to SEQ ID NO: 466

SEQ ID NO: 519 - protein, 34 aa, Porcine reproductive and respiratory syndrome virus
LVNASSNSSSHLQLIYNLTLCELNGTDWLKNKFD

SEQ ID NO: 520 - protein, 34 aa, Porcine reproductive and respiratory syndrome virus; identical to SEQ ID NO: 444

SEQ ID NO: 521 - protein, 34 aa, Porcine reproductive and respiratory syndrome virus; identical to SEQ ID NO: 484

SEQ ID NO: 522 - protein, 34 aa, Porcine reproductive and respiratory syndrome virus
LANASNESSSHLQLIYNLTLCELNGTDWLANKFD

SEQ ID NO: 523 - protein, 34 aa, Porcine reproductive and respiratory syndrome virus
IVNASGNSSSHFQLIYNLTLCELNGTDWLADKFD

SEQ ID NO: 524 - protein, 34 aa, Porcine reproductive and respiratory syndrome virus; identical to SEQ ID NO: 227

SEQ ID NO: 525 - protein, 34 aa, Porcine reproductive and respiratory syndrome virus
PVNADTNNSSKLQLIYNLTLCELNGTDWLADRFN

SEQ ID NO: 526 - protein, 34 aa, Porcine reproductive and respiratory syndrome virus
IVNANGNSSSHIQLIYNLTLCELNGTBWLAKKFD

SEQ ID NO: 527 - protein, 34 aa, Porcine reproductive and respiratory syndrome virus
LVNANSTSSSHIQLIYNLTLCELNGTDWLKNKFD

SEQ ID NO: 528 - protein, 34 aa, Porcine reproductive and respiratory syndrome virus
LVNANSTSSSHIQLIYNLTLCELNGTDWLNNKFD

SEQ ID NO: 529 - protein, 34 aa, Porcine reproductive and respiratory syndrome virus; identical to SEQ ID NO: 188

SEQ ID NO: 530 - protein, 34 aa, Porcine reproductive and respiratory syndrome virus; identical to SEQ ID NO: 475

SEQ ID NO: 531 - protein, 34 aa, Porcine reproductive and respiratory syndrome virus; identical to SEQ ID NO: 188

SEQ ID NO: 532 - protein, 33 aa, Porcine reproductive and respiratory syndrome virus
VNASSNSSSHFQLIYNLTLCELNGTDWLVNKFD

SEQ ID NO: 533 - protein, 34 aa, Porcine reproductive and respiratory syndrome virus
LVNASYNNSSHLQLIYNLTLCELNGTDWLANKFD

SEQ ID NO: 534 - protein, 34 aa, Porcine reproductive and respiratory syndrome virus
LVDANSNSSSHFQLIYNLTLCELNGTDWLANKFD

SEQ ID NO: 535 - protein, 34 aa, Porcine reproductive and respiratory syndrome virus; identical to SEQ ID NO: 484

SEQ ID NO: 536 - protein, 34 aa, Porcine reproductive and respiratory syndrome virus; identical to SEQ ID NO: 75

SEQ ID NO: 537 - protein, 34 aa, Porcine reproductive and respiratory syndrome virus
LVNANSNSSSHFQSIYNLTLCELNGTEWLNDHFN

SEQ ID NO: 538 - protein, 34 aa, Porcine reproductive and respiratory syndrome virus
IVNANSNSSSHFQLIYNLTLCELNGTDWLNKKFD

SEQ ID NO: 539 - protein, 34 aa, Porcine reproductive and respiratory syndrome virus
IVNANSNSSSHFQLIYNLTLCELNGTDWLNEKFD

SEQ ID NO: 540 - protein, 34 aa, Porcine reproductive and respiratory syndrome virus
LVNANSSSSSHLQLIYNLTLCELNGTDWLADKFD

SEQ ID NO: 541 - protein, 34 aa, Porcine reproductive and respiratory syndrome virus; identical to SEQ ID NO: 55

SEQ ID NO: 542 - protein, 34 aa, Porcine reproductive and respiratory syndrome virus
IVNASSNSSSHFQLIYNLTLCELNGTDWLANKFD

SEQ ID NO: 543 - protein, 34 aa, Porcine reproductive and respiratory syndrome virus; identical to SEQ ID NO: 47

SEQ ID NO: 544 - protein, 34 aa, Porcine reproductive and respiratory syndrome virus
IVNASSNSSSHFQLIYNLTLCELNGTEWLADKFD

SEQ ID NO: 545 - protein, 34 aa, Porcine reproductive and respiratory syndrome virus
LVNASANSSSHLQLIYNLTICELNGTDWLGKKFD

SEQ ID NO: 546 - protein, 34 aa, Porcine reproductive and respiratory syndrome virus
LVNANSTSSSHFQLIYNLTLCELNGTDWLAGKFD

SEQ ID NO: 547 - protein, 34 aa, Porcine reproductive and respiratory syndrome virus; identical to SEQ ID NO: 47

SEQ ID NO: 548 - protein, 34 aa, Porcine reproductive and respiratory syndrome virus; identical to SEQ ID NO: 39

SEQ ID NO: 549 - protein, 34 aa, Porcine reproductive and respiratory syndrome virus; identical to SEQ ID NO: 544

SEQ ID NO: 550 - protein, 34 aa, Porcine reproductive and respiratory syndrome virus
LVNANSNSSSHFQLIYNLTLCELNGTDWLSDKFD

SEQ ID NO: 551 - protein, 34 aa, Porcine reproductive and respiratory syndrome virus; identical to SEQ ID NO: 39

SEQ ID NO: 552 - protein, 34 aa, Porcine reproductive and respiratory syndrome virus; identical to SEQ ID NO: 188

SEQ ID NO: 553 - protein, 34 aa, Porcine reproductive and respiratory syndrome virus; identical to SEQ ID NO: 55

SEQ ID NO: 554 - protein, 34 aa, Porcine reproductive and respiratory syndrome virus
LVNANNNSSSHLQLIYNLTICELNGTDWLKDKFD

SEQ ID NO: 555 - protein, 34 aa, Porcine reproductive and respiratory syndrome virus
IVNANSNSSSHFQLIYNLTLCELNGTDWLVDKFD

SEQ ID NO: 556 - protein, 34 aa, Porcine reproductive and respiratory syndrome virus
LVNANSNSSSHFQLIYNLTLCELNGTDWLSNKFD

SEQ ID NO: 557 - protein, 34 aa, Porcine reproductive and respiratory syndrome virus; identical to SEQ ID NO: 47

SEQ ID NO: 558 - protein, 34 aa, Porcine reproductive and respiratory syndrome virus
LVDANSNSSSHFQLIYNLTLCELNGTDWLGKKFD

SEQ ID NO: 559 - protein, 34 aa, Porcine reproductive and respiratory syndrome virus
LVNASSNHSSHLQLIYNLTLCELNGTDWLENKFD

SEQ ID NO: 560 - protein, 34 aa, Porcine reproductive and respiratory syndrome virus
LVNANSNSSSHFQLIYNLTLCELNGTDWLADKFD

SEQ ID NO: 561 - protein, 34 aa, Porcine reproductive and respiratory syndrome virus
LVNANSSSSSHFQLIYNLTLCELNGTDWLAKKFD

SEQ ID NO: 562 - protein, 34 aa, Porcine reproductive and respiratory syndrome virus; identical to SEQ ID NO: 47

SEQ ID NO: 563 - protein, 34 aa, Porcine reproductive and respiratory syndrome virus
LANASNNSSSHLQLIYNLTLCELNGTDWLANRFD

SEQ ID NO: 564 - protein, 34 aa, Porcine reproductive and respiratory syndrome virus
LVNASNNSSSHLQLIYNLTLCELNGTDWLADKFD

SEQ ID NO: 565 - protein, 34 aa, Porcine reproductive and respiratory syndrome virus
LVNANSSSSSHFQLIYNLTLCELNGTDWLSNKFD

SEQ ID NO: 566 - protein, 34 aa, Porcine reproductive and respiratory syndrome virus; identical to SEQ ID NO: 223

SEQ ID NO: 567 - protein, 34 aa, Porcine reproductive and respiratory syndrome virus
LVNANSNSSSHFQLIYNLTLCELNGTDWLGNKFD

SEQ ID NO: 568 - protein, 34 aa, Porcine reproductive and respiratory syndrome virus
LVNANSNSSSHFQLIYNLTLCELNGTDWLTNKFD

SEQ ID NO: 569 - protein, 34 aa, Porcine reproductive and respiratory syndrome virus
LVNASSNSSSHFQLIYNLTLCELNGTDWLSNKFD

SEQ ID NO: 570 - protein, 34 aa, Porcine reproductive and respiratory syndrome virus
LVNANSNSSSHFQLIYNLTLCELNGTDWLADKFN

SEQ ID NO: 571 - protein, 34 aa, Porcine reproductive and respiratory syndrome virus
LVNANSNSSSHFQLIYNLTLCELNGTDWLKEKFD

SEQ ID NO: 572 - protein, 34 aa, Porcine reproductive and respiratory syndrome virus
LVNANSNSSSHFQLIYNLTLCELNGTDWLAKKFD

SEQ ID NO: 573 - protein, 34 aa, Porcine reproductive and respiratory syndrome virus
IVNASSNSSSHLQLIYKLTLCELNGTDWLANKFD

SEQ ID NO: 574 - protein, 34 aa, Porcine reproductive and respiratory syndrome virus
LVNANSNSSSHFQLIYNLTLCELNGTEWLADKFD

SEQ ID NO: 575 - protein, 34 aa, Porcine reproductive and respiratory syndrome virus; identical to SEQ ID NO: 75

SEQ ID NO: 576 - protein, 34 aa, Porcine reproductive and respiratory syndrome virus; identical to SEQ ID NO: 243

SEQ ID NO: 577 - protein, 34 aa, Porcine reproductive and respiratory syndrome virus
IVNANSNSSSHIQLIYNLTLCELNGTDWLAEKFD

SEQ ID NO: 578 - protein, 34 aa, Porcine reproductive and respiratory syndrome virus
LVNASSNSSSHFQLIYNLTLCELNGTDWLKDKFD

SEQ ID NO: 579 - protein, 34 aa, Porcine reproductive and respiratory syndrome virus
IVNANSNSSSHLQLIYNLTLCELNGTDWLAKKFD

SEQ ID NO: 580 - protein, 34 aa, Porcine reproductive and respiratory syndrome virus
LVNASGNSSSHLQLIYNLTLCELNGTDWLANKFD

SEQ ID NO: 581 - protein, 34 aa, Porcine reproductive and respiratory syndrome virus
LVNASGNSSSHLQLIYNLTICELNGTDWLDKKFD

SEQ ID NO: 582 - protein, 34 aa, Porcine reproductive and respiratory syndrome virus
LVNANNSSSSHFQLIYNLTLCELNGTDWLAKKFD

SEQ ID NO: 583 - protein, 34 aa, Porcine reproductive and respiratory syndrome virus; identical to SEQ ID NO: 570

SEQ ID NO: 584 - protein, 34 aa, Porcine reproductive and respiratory syndrome virus; identical to SEQ ID NO: 502

SEQ ID NO: 585 - protein, 34 aa, Porcine reproductive and respiratory syndrome virus
PANADNSSSSHLQLIYNLTLCELNGTDWLANKFD

SEQ ID NO: 586 - protein, 34 aa, Porcine reproductive and respiratory syndrome virus
  misc_feature (7)..(7): Xaa can be any naturally occurring amino acid
LVNANSXSSSHFQLIYNLTLCELNGTDWLAGKFD

SEQ ID NO: 587 - protein, 34 aa, Porcine reproductive and respiratory syndrome virus; identical to SEQ ID NO: 177

SEQ ID NO: 588 - protein, 34 aa, Porcine reproductive and respiratory syndrome virus; identical to SEQ ID NO: 177

SEQ ID NO: 589 - protein, 34 aa, Porcine reproductive and respiratory syndrome virus
IVNASNTSSSHFQLIYNMTICELNGTDWLANKFD

SEQ ID NO: 590 - protein, 34 aa, Porcine reproductive and respiratory syndrome virus
LVNANSNSSSHLQLIYNLTLCELNGTDWLSDKFN

SEQ ID NO: 591 - protein, 34 aa, Porcine reproductive and respiratory syndrome virus
IVNASSNSSSHFQLIYNLTICELNGTDWLNKKFD

SEQ ID NO: 592 - protein, 34 aa, Porcine reproductive and respiratory syndrome virus; identical to SEQ ID NO: 64

SEQ ID NO: 593 - protein, 34 aa, Porcine reproductive and respiratory syndrome virus
IVNANSNSSSHFQLIYNLTLCELNGTEWLANKFD

SEQ ID NO: 594 - protein, 34 aa, Porcine reproductive and respiratory syndrome virus
LVNANSNNSSHFQLIYNLTICELNGTDWLNNKFD

SEQ ID NO: 595 - protein, 34 aa, Porcine reproductive and respiratory syndrome virus
LVNANSNSSSHFQLIYNLTLCELNGTDWLDKKFD

SEQ ID NO: 596 - protein, 34 aa, Porcine reproductive and respiratory syndrome virus
LVNASSNSSSHFQLIYNLTLCELNGTDWLAEKFD

SEQ ID NO: 597 - protein, 34 aa, Porcine reproductive and respiratory syndrome virus; identical to SEQ ID NO: 55

SEQ ID NO: 598 - protein, 34 aa, Porcine reproductive and respiratory syndrome virus
LANANSDSSSHLQLIYNLTLCELNGTDWLANKFD

SEQ ID NO: 599 - protein, 34 aa, Porcine reproductive and respiratory syndrome virus; identical to SEQ ID NO: 253

SEQ ID NO: 600 - protein, 34 aa, Porcine reproductive and respiratory syndrome virus
LVNAKSNSSSHLQLIYNLTLCELNGTDWLKNKFD

SEQ ID NO: 601 - protein, 34 aa, Porcine reproductive and respiratory syndrome virus
LVNANSNSSSHFQLIYNLTICELNGTDWLDEKFD

SEQ ID NO: 602 - protein, 34 aa, Porcine reproductive and respiratory syndrome virus
LVDASNNSSSHLQLIYNLTLCELNGTDWLANKFD

SEQ ID NO: 603 - protein, 34 aa, Porcine reproductive and respiratory syndrome virus; identical to SEQ ID NO: 177

SEQ ID NO: 604 - protein, 34 aa, Porcine reproductive and respiratory syndrome virus
LVNANSNSSSHLQLIYNLTLCELNGTDWLRNKFD

SEQ ID NO: 605 - protein, 34 aa, Porcine reproductive and respiratory syndrome virus
LVNANSNSSSHLQLIYNLTLCELNGTDWLNDRFD

SEQ ID NO: 606 - protein, 34 aa, Porcine reproductive and respiratory syndrome virus; identical to SEQ ID NO: 55

SEQ ID NO: 607 - protein, 34 aa, Porcine reproductive and respiratory syndrome virus; identical to SEQ ID NO: 47

SEQ ID NO: 608 - protein, 34 aa, Porcine reproductive and respiratory syndrome virus; identical to SEQ ID NO: 550

SEQ ID NO: 609 - protein, 34 aa, Porcine reproductive and respiratory syndrome virus
LVNANSQNSSHFQLIYNLTLCELNGTDWLVNKFD

SEQ ID NO: 610 - protein, 34 aa, Porcine reproductive and respiratory syndrome virus; identical to SEQ ID NO: 513

SEQ ID NO: 611 - protein, 34 aa, Porcine reproductive and respiratory syndrome virus; identical to SEQ ID NO: 41

SEQ ID NO: 612 - protein, 34 aa, Porcine reproductive and respiratory syndrome virus
LANASNNSSSHLQLIYNLTLCELNGTDWLADRFD

SEQ ID NO: 613 - protein, 34 aa, Porcine reproductive and respiratory syndrome virus; identical to SEQ ID NO: 353

SEQ ID NO: 614 - protein, 34 aa, Porcine reproductive and respiratory syndrome virus
  misc_feature (5)..(5): Xaa can be any naturally occurring amino acid
LANAXENSSSHLQLIYNLTLCELNGTDWLANKFD

SEQ ID NO: 615 - protein, 34 aa, Porcine reproductive and respiratory syndrome virus; identical to SEQ ID NO: 55

SEQ ID NO: 616 - protein, 34 aa, Porcine reproductive and respiratory syndrome virus; identical to SEQ ID NO: 55

SEQ ID NO: 617 - protein, 34 aa, Porcine reproductive and respiratory syndrome virus
LVNANSNSSSHFQLIYNLTLCELNGTDWLAKNFD

SEQ ID NO: 618 - protein, 34 aa, Porcine reproductive and respiratory syndrome virus; identical to SEQ ID NO: 593

SEQ ID NO: 619 - protein, 34 aa, Porcine reproductive and respiratory syndrome virus
LANANENSSSHLQLIYNLTLCELNGTDWLANKFD

SEQ ID NO: 620 - protein, 34 aa, Porcine reproductive and respiratory syndrome virus; identical to SEQ ID NO: 563

SEQ ID NO: 621 - protein, 34 aa, Porcine reproductive and respiratory syndrome virus
LVNANSNSSSHFQLIYNLTLCELNGTDWLSKKFD

SEQ ID NO: 622 - protein, 34 aa, Porcine reproductive and respiratory syndrome virus
LVNAGSNSSSHFQLIYNLTLCELNGTDWLKDKFD

SEQ ID NO: 623 - protein, 34 aa, Porcine reproductive and respiratory syndrome virus; identical to SEQ ID NO: 39

SEQ ID NO: 624 - protein, 34 aa, Porcine reproductive and respiratory syndrome virus; identical to SEQ ID NO: 229

SEQ ID NO: 625 - protein, 34 aa, Porcine reproductive and respiratory syndrome virus; identical to SEQ ID NO: 605

SEQ ID NO: 626 - protein, 34 aa, Porcine reproductive and respiratory syndrome virus
LVNANSTSSSHFQLIYNLTLCELNGTEWLANRFD

SEQ ID NO: 627 - protein, 34 aa, Porcine reproductive and respiratory syndrome virus
LVNANSNSSSHLQLIYNLTLCELNGTDWLAKRFD

SEQ ID NO: 628 - protein, 34 aa, Porcine reproductive and respiratory syndrome virus
LVNANSNSSSQLQLIYNLTLCELNGTDWLANKFD

SEQ ID NO: 629 - protein, 34 aa, Porcine reproductive and respiratory syndrome virus; identical to SEQ ID NO: 572

SEQ ID NO: 630 - protein, 34 aa, Porcine reproductive and respiratory syndrome virus; identical to SEQ ID NO: 486

SEQ ID NO: 631 - protein, 34 aa, Porcine reproductive and respiratory syndrome virus; identical to SEQ ID NO: 486

SEQ ID NO: 632 - protein, 34 aa, Porcine reproductive and respiratory syndrome virus; identical to SEQ ID NO: 486

SEQ ID NO: 633 - protein, 34 aa, Porcine reproductive and respiratory syndrome virus; identical to SEQ ID NO: 267

SEQ ID NO: 634 - protein, 34 aa, Porcine reproductive and respiratory syndrome virus
  misc_feature (7)..(7): Xaa can be any naturally occurring amino acid
  misc_feature (31)..(31): Xaa can be any naturally occurring amino acid
LVNANSXSSSHLQLIYNLTICELNGTDWLTXHFS

SEQ ID NO: 635 - protein, 34 aa, Porcine reproductive and respiratory syndrome virus; identical to SEQ ID NO: 486

SEQ ID NO: 636 - protein, 34 aa, Porcine reproductive and respiratory syndrome virus; identical to SEQ ID NO: 486

SEQ ID NO: 637 - protein, 34 aa, Porcine reproductive and respiratory syndrome virus; identical to SEQ ID NO: 227

SEQ ID NO: 638 - protein, 34 aa, Porcine reproductive and respiratory syndrome virus; identical to SEQ ID NO: 486

SEQ ID NO: 639 - protein, 34 aa, Porcine reproductive and respiratory syndrome virus; identical to SEQ ID NO: 55

SEQ ID NO: 640 - protein, 34 aa, Porcine reproductive and respiratory syndrome virus
  misc_feature (19)..(19): Xaa can be any naturally occurring amino acid
  misc_feature (22)..(22): Xaa can be any naturally occurring amino acid
  misc_feature (30)..(30): Xaa can be any naturally occurring amino acid
LVNADSNSSSHLQSIYNLXICXLNGTDWLXNHFS

SEQ ID NO: 641 - protein, 34 aa, Porcine reproductive and respiratory syndrome virus; identical to SEQ ID NO: 560

SEQ ID NO: 642 - protein, 34 aa, Porcine reproductive and respiratory syndrome virus
IVDANSNSSSHFQLIYNLTICELNGTDWLGEKFD

SEQ ID NO: 643 - protein, 34 aa, Porcine reproductive and respiratory syndrome virus
LVNASNNSSSHLQLIYNLTLCELNGTDWLADRFD

SEQ ID NO: 644 - protein, 34 aa, Porcine reproductive and respiratory syndrome virus
LVNASNDSSSHLQLIYNLTICELNGTDWLGKKFD

SEQ ID NO: 645 - protein, 34 aa, Porcine reproductive and respiratory syndrome virus
  misc_feature (27)..(27): Xaa can be any naturally occurring amino acid
LVNADSNSSSHLQLIYNLTICELNGTXWLNNHFS

SEQ ID NO: 646 - protein, 34 aa, Porcine reproductive and respiratory syndrome virus
LVNANSNSSSHFQLIYNLTLCELNGTDWLANNFD

SEQ ID NO: 647 - protein, 34 aa, Porcine reproductive and respiratory syndrome virus; identical to SEQ ID NO: 47

SEQ ID NO: 648 - protein, 34 aa, Porcine reproductive and respiratory syndrome virus
LVNADSNSSSHLQLIYNLTICELNGTDWLNDHFS

SEQ ID NO: 649 - protein, 34 aa, Porcine reproductive and respiratory syndrome virus
SFADGNGNNSTYQYIYNLTICELNGTKWLSGHFD

SEQ ID NO: 650 - protein, 34 aa, Porcine reproductive and respiratory syndrome virus
  misc_feature (31)..(31): Xaa can be any naturally occurring amino acid
IVNANSBSSSHIQLIYNLTLCELNGTDWLAXKFD

SEQ ID NO: 651 - protein, 34 aa, Porcine reproductive and respiratory syndrome virus; identical to SEQ ID NO: 563

SEQ ID NO: 652 - protein, 34 aa, Porcine reproductive and respiratory syndrome virus
LVNADSNRSSHFQSIYNLTLCELNGTDWLAGKFD

SEQ ID NO: 653 - protein, 34 aa, Porcine reproductive and respiratory syndrome virus; identical to SEQ ID NO: 567

SEQ ID NO: 654 - protein, 34 aa, Porcine reproductive and respiratory syndrome virus
LVNANSNSSSHFQLIYNLTLCELNGTDWLKDKFD

SEQ ID NO: 655 - protein, 34 aa, Porcine reproductive and respiratory syndrome virus
LVNANSNSSSHLQLIYNLTLCELNGTDWLANKFD

SEQ ID NO: 656 - protein, 34 aa, Porcine reproductive and respiratory syndrome virus
LVDANSNSSSHFQLIYNLTLCELNGTDWLNNKFD

SEQ ID NO: 657 - protein, 34 aa, Porcine reproductive and respiratory syndrome virus; identical to SEQ ID NO: 267

SEQ ID NO: 658 - protein, 34 aa, Porcine reproductive and respiratory syndrome virus
IVNASGNSSSHFQLIYNLTLCELNGTEWLANKFD

SEQ ID NO: 659 - protein, 34 aa, Porcine reproductive and respiratory syndrome virus
LANASNNSSSHLQLIYNLTLCELNGTDWLAGKFD

SEQ ID NO: 660 - protein, 34 aa, Porcine reproductive and respiratory syndrome virus; identical to SEQ ID NO: 484

SEQ ID NO: 661 - protein, 34 aa, Porcine reproductive and respiratory syndrome virus; identical to SEQ ID NO: 486

SEQ ID NO: 662 - protein, 34 aa, Porcine reproductive and respiratory syndrome virus; identical to SEQ ID NO: 267

SEQ ID NO: 663 - protein, 34 aa, Porcine reproductive and respiratory syndrome virus
LVNANSNSSSHLQLIYNLTICELNGTEWLNNHFS

SEQ ID NO: 664 - protein, 34 aa, Porcine reproductive and respiratory syndrome virus; identical to SEQ ID NO: 456

SEQ ID NO: 665 - protein, 34 aa, Porcine reproductive and respiratory syndrome virus
LVNAGSNNSSHLQLIYNLTICELNGTDWLNNHFS

SEQ ID NO: 666 - protein, 34 aa, Porcine reproductive and respiratory syndrome virus
LVNASNNSSSHLQLIYNMTVCELNGTDWLKNKFD

SEQ ID NO: 667 - protein, 34 aa, Porcine reproductive and respiratory syndrome virus
LVNASNDSSSHLQLIYNLTLCELNGTDWLADKFD

SEQ ID NO: 668 - protein, 34 aa, Porcine reproductive and respiratory syndrome virus; identical to SEQ ID NO: 360

SEQ ID NO: 669 - protein, 34 aa, Porcine reproductive and respiratory syndrome virus; identical to SEQ ID NO: 41

SEQ ID NO: 670 - protein, 34 aa, Porcine reproductive and respiratory syndrome virus; identical to SEQ ID NO: 572

SEQ ID NO: 671 - protein, 34 aa, Porcine reproductive and respiratory syndrome virus; identical to SEQ ID NO: 572

SEQ ID NO: 672 - protein, 34 aa, Porcine reproductive and respiratory syndrome virus; identical to SEQ ID NO: 564

SEQ ID NO: 673 - protein, 34 aa, Porcine reproductive and respiratory syndrome virus
LVDANSNSSSHFQLIYNLTLCELNGTDWLAKKFD

SEQ ID NO: 674 - protein, 34 aa, Porcine reproductive and respiratory syndrome virus
LVNASSNSSSHFQLIYNLTLCELNGTDWLATKFD

SEQ ID NO: 675 - protein, 34 aa, Porcine reproductive and respiratory syndrome virus
LVNANSSSSSHLQLIYNLTICELNGTDWLNNHFS

SEQ ID NO: 676 - protein, 34 aa, Porcine reproductive and respiratory syndrome virus
LVNANSNSSSHFQLIYNLTICELNGTDWLKERFD

SEQ ID NO: 677 - protein, 34 aa, Porcine reproductive and respiratory syndrome virus
LVNASGNSSSHLQLIYNLTLCELNGTDWLADKFD

SEQ ID NO: 678 - protein, 34 aa, Porcine reproductive and respiratory syndrome virus; identical to SEQ ID NO: 571

SEQ ID NO: 679 - protein, 33 aa, Porcine reproductive and respiratory syndrome virus
LVNASDSSSHLQLIYNLTICELNGTDWLNNHFS

SEQ ID NO: 680 - protein, 34 aa, Porcine reproductive and respiratory syndrome virus
LVNASSNSSSHLQLIYNLTICELNGTDWLNNHFS

SEQ ID NO: 681 - protein, 34 aa, Porcine reproductive and respiratory syndrome virus
LVDANSNSSSHLQLIYNLTLCELNGTDWLADKFD

SEQ ID NO: 682 - protein, 34 aa, Porcine reproductive and respiratory syndrome virus; identical to SEQ ID NO: 360

SEQ ID NO: 683 - protein, 34 aa, Porcine reproductive and respiratory syndrome virus; identical to SEQ ID NO: 75

SEQ ID NO: 684 - protein, 34 aa, Porcine reproductive and respiratory syndrome virus; identical to SEQ ID NO: 680

SEQ ID NO: 685 - protein, 34 aa, Porcine reproductive and respiratory syndrome virus
LVNANSNSSSHFQLIYNLTLCELNGTEWLGKKFD

SEQ ID NO: 686 - protein, 34 aa, Porcine reproductive and respiratory syndrome virus
LVNANSNSSSHFQLIYNLTLCELNGTDWLAGKFD

SEQ ID NO: 687 - protein, 34 aa, Porcine reproductive and respiratory syndrome virus; identical to SEQ ID NO: 617

SEQ ID NO: 688 - protein, 34 aa, Porcine reproductive and respiratory syndrome virus; identical to SEQ ID NO: 542

SEQ ID NO: 689 - protein, 34 aa, Porcine reproductive and respiratory syndrome virus; identical to SEQ ID NO: 572

SEQ ID NO: 690 - protein, 34 aa, Porcine reproductive and respiratory syndrome virus
LVNANSNSSSHFQLIYNLTLCELNGTDWLGKKFD

SEQ ID NO: 691 - protein, 34 aa, Porcine reproductive and respiratory syndrome virus
LVDANSNSSSHFQLIYNLTICELNGTDWLEKKFD

SEQ ID NO: 692 - protein, 34 aa, Porcine reproductive and respiratory syndrome virus; identical to SEQ ID NO: 172

SEQ ID NO: 693 - protein, 34 aa, Porcine reproductive and respiratory syndrome virus
LVNANSNHSSHFQLIYNLTLCELNGTEWLANKFD

SEQ ID NO: 694 - protein, 34 aa, Porcine reproductive and respiratory syndrome virus
LVNAGSNSSSHLQLIYNLTICELNGTDWLNNHFS

SEQ ID NO: 695 - protein, 34 aa, Porcine reproductive and respiratory syndrome virus
  misc_feature (31)..(31): Xaa can be any naturally occurring amino acid
LANANSNSSSHLQLIYNLTLCELNGTDWLAXKFD

SEQ ID NO: 696 - protein, 34 aa, Porcine reproductive and respiratory syndrome virus
LVNASGNSSSHLQLIYNLTICELNGTDWLNNTFD

SEQ ID NO: 697 - protein, 34 aa, Porcine reproductive and respiratory syndrome virus; identical to SEQ ID NO: 486

SEQ ID NO: 698 - protein, 34 aa, Porcine reproductive and respiratory syndrome virus; identical to SEQ ID NO: 596

SEQ ID NO: 699 - protein, 34 aa, Porcine reproductive and respiratory syndrome virus
IVNANGNSSSHFQLIYNLTLCELNGTEWLANKFD

SEQ ID NO: 700 - protein, 34 aa, Porcine reproductive and respiratory syndrome virus
LVNASSNSSSHFQLIYNLTLCELNGTEWLADKFD

SEQ ID NO: 701 - protein, 34 aa, Porcine reproductive and respiratory syndrome virus; identical to SEQ ID NO: 574

SEQ ID NO: 702 - protein, 34 aa, Porcine reproductive and respiratory syndrome virus
PVNANKTDSSKLQLIYNLTLCELNGTDWLANKFD

SEQ ID NO: 703 - protein, 34 aa, Porcine reproductive and respiratory syndrome virus
LVNANGNSSSHFQLIYNLTLCELNGTDWLGKKFD

SEQ ID NO: 704 - protein, 34 aa, Porcine reproductive and respiratory syndrome virus
LVSANSNSSSHFQLIYNLTLCELNGTDWLAKKFD

SEQ ID NO: 705 - protein, 34 aa, Porcine reproductive and respiratory syndrome virus
  misc_feature (7)..(7): Xaa can be any naturally occurring amino acid
LVNANSXSSSHLQLIYNLTLCELNGTDWLKNKFD

SEQ ID NO: 706 - protein, 34 aa, Porcine reproductive and respiratory syndrome virus
LVNANSNSSSHLQLIYNLTICELNGTEWLDNHFS

SEQ ID NO: 707 - protein, 34 aa, Porcine reproductive and respiratory syndrome virus; identical to SEQ ID NO: 267

SEQ ID NO: 708 - protein, 34 aa, Porcine reproductive and respiratory syndrome virus
  misc_feature (31)..(31): Xaa can be any naturally occurring amino acid
LVNANSNSSSHFQLIYNLTLCELNGTDWLAXKFD

SEQ ID NO: 709 - protein, 34 aa, Porcine reproductive and respiratory syndrome virus; identical to SEQ ID NO: 708
  misc_feature (31)..(31): Xaa can be any naturally occurring amino acid

SEQ ID NO: 710 - protein, 34 aa, Porcine reproductive and respiratory syndrome virus; identical to SEQ ID NO: 484

SEQ ID NO: 711 - protein, 34 aa, Porcine reproductive and respiratory syndrome virus; identical to SEQ ID NO: 680

SEQ ID NO: 712 - protein, 34 aa, Porcine reproductive and respiratory syndrome virus; identical to SEQ ID NO: 267

SEQ ID NO: 713 - protein, 34 aa, Porcine reproductive and respiratory syndrome virus
LVNANSNSSSHIQLIYNLTLCELNGTEWLSGKFD

SEQ ID NO: 714 - protein, 34 aa, Porcine reproductive and respiratory syndrome virus
LVNANNDSSSHMQLIYNLTICELNGTDWLANHFG

SEQ ID NO: 715 - protein, 34 aa, Porcine reproductive and respiratory syndrome virus
IVNANSSSSSHIQLIYNLTLCELNGTDWLADKFD

SEQ ID NO: 716 - protein, 34 aa, Porcine reproductive and respiratory syndrome virus; identical to SEQ ID NO: 486

SEQ ID NO: 717 - protein, 34 aa, Porcine reproductive and respiratory syndrome virus
LVNASGNSSSHLQLIYNLTICELNGTDWLNDKFD

SEQ ID NO: 718 - protein, 34 aa, Porcine reproductive and respiratory syndrome virus; identical to SEQ ID NO: 690

SEQ ID NO: 719 - protein, 34 aa, Porcine reproductive and respiratory syndrome virus; identical to SEQ ID NO: 499

SEQ ID NO: 720 - protein, 34 aa, Porcine reproductive and respiratory syndrome virus
LVNANSNSSSHLQSIYNLTICELNGTDWLNNHFS

SEQ ID NO: 721 - protein, 34 aa, Porcine reproductive and respiratory syndrome virus
LVNASNNSSSHLQLIYNLTICELNGTDWLGNTFN

SEQ ID NO: 722 - protein, 34 aa, Porcine reproductive and respiratory syndrome virus; identical to SEQ ID NO: 696

SEQ ID NO: 723 - protein, 34 aa, Porcine reproductive and respiratory syndrome virus
  misc_feature (19)..(19): Xaa can be any naturally occurring amino acid
  misc_feature (30)..(30): Xaa can be any naturally occurring amino acid
LVNADSNSSSHLQLIYNLXICELNGTDWLXNHFS

SEQ ID NO: 724 - protein, 34 aa, Porcine reproductive and respiratory syndrome virus; identical to SEQ ID NO: 546

SEQ ID NO: 725 - protein, 34 aa, Porcine reproductive and respiratory syndrome virus; identical to SEQ ID NO: 486

SEQ ID NO: 726 - protein, 34 aa, Porcine reproductive and respiratory syndrome virus; identical to SEQ ID NO: 572

SEQ ID NO: 727 - protein, 34 aa, Porcine reproductive and respiratory syndrome virus; identical to SEQ ID NO: 267

SEQ ID NO: 728 - protein, 34 aa, Porcine reproductive and respiratory syndrome virus
LVNANNTSSSHLQLIYNLTLCELNGTDWLANKFD

SEQ ID NO: 729 - protein, 34 aa, Porcine reproductive and respiratory syndrome virus; identical to SEQ ID NO: 690

SEQ ID NO: 730 - protein, 34 aa, Porcine reproductive and respiratory syndrome virus; identical to SEQ ID NO: 546

SEQ ID NO: 731 - protein, 34 aa, Porcine reproductive and respiratory syndrome virus; identical to SEQ ID NO: 47

SEQ ID NO: 732 - protein, 34 aa, Porcine reproductive and respiratory syndrome virus; identical to SEQ ID NO: 267

SEQ ID NO: 733 - protein, 34 aa, Porcine reproductive and respiratory syndrome virus; identical to SEQ ID NO: 680

SEQ ID NO: 734 - protein, 34 aa, Porcine reproductive and respiratory syndrome virus
LVNANSNSSSHLQLIYNLTICELNGTDWLNNTFD

SEQ ID NO: 735 - protein, 34 aa, Porcine reproductive and respiratory syndrome virus; identical to SEQ ID NO: 696

SEQ ID NO: 736 - protein, 34 aa, Porcine reproductive and respiratory syndrome virus; identical to SEQ ID NO: 93

SEQ ID NO: 737 - protein, 34 aa, Porcine reproductive and respiratory syndrome virus
LVNASNSSSSHLQLIYNLTLCELNGTDWLADKFD

SEQ ID NO: 738 - protein, 34 aa, Porcine reproductive and respiratory syndrome virus; identical to SEQ ID NO: 61

SEQ ID NO: 739 - protein, 34 aa, Porcine reproductive and respiratory syndrome virus
FVNANSNSSSHFQLIYNLTLCELNGTDWLNNKFD

SEQ ID NO: 740 - protein, 34 aa, Porcine reproductive and respiratory syndrome virus
LVNAHSNSSSHLQLIYNLTICELNGTDWLNRHFS

SEQ ID NO: 741 - protein, 34 aa, Porcine reproductive and respiratory syndrome virus
LVNASSNSSSHLQLIYNLTICELNGTDWLNNRFS

SEQ ID NO: 742 - protein, 34 aa, Porcine reproductive and respiratory syndrome virus; identical to SEQ ID NO: 48

SEQ ID NO: 743 - protein, 34 aa, Porcine reproductive and respiratory syndrome virus
LVDANSNSSSHFQLIYNLTICELNGTDWLKEKFD

SEQ ID NO: 744 - protein, 34 aa, Porcine reproductive and respiratory syndrome virus; identical to SEQ ID NO: 680

SEQ ID NO: 745 - protein, 34 aa, Porcine reproductive and respiratory syndrome virus
LVNASSNSSSHLQLIYNMTVCELNGTDWLKTKFD

SEQ ID NO: 746 - protein, 34 aa, Porcine reproductive and respiratory syndrome virus
IVNADSNSSSHFQLIYNLTLCELNGTDWLAKKFD

SEQ ID NO: 747 - protein, 34 aa, Porcine reproductive and respiratory syndrome virus; identical to SEQ ID NO: 350

SEQ ID NO: 748 - protein, 34 aa, Porcine reproductive and respiratory syndrome virus; identical to SEQ ID NO: 572

SEQ ID NO: 749 - protein, 34 aa, Porcine reproductive and respiratory syndrome virus; identical to SEQ ID NO: 178

SEQ ID NO: 750 - protein, 34 aa, Porcine reproductive and respiratory syndrome virus
  misc_feature (19)..(19): Xaa can be any naturally occurring amino acid
LVNADSNSSSHLQLIYNLXICELNGTDWLNNHFS

SEQ ID NO: 751 - protein, 34 aa, Porcine reproductive and respiratory syndrome virus
  misc_feature (30)..(30): Xaa can be any naturally occurring amino acid
LVNANSNSSSHLQSIYNLTICELNGTDWLXNHFS

SEQ ID NO: 752 - protein, 34 aa, Porcine reproductive and respiratory syndrome virus; identical to SEQ ID NO: 256

SEQ ID NO: 753 - protein, 34 aa, Porcine reproductive and respiratory syndrome virus; identical to SEQ ID NO: 267

SEQ ID NO: 754 - protein, 34 aa, Porcine reproductive and respiratory syndrome virus
LVNANSNSSSHLQLIYNLTLCELNGTDWLAGKFS

SEQ ID NO: 755 - protein, 34 aa, Porcine reproductive and respiratory syndrome virus
IVNASSNSSSHFQLIYNLTICELNGTDWLNQKFD

SEQ ID NO: 756 - protein, 34 aa, Porcine reproductive and respiratory syndrome virus
LVNASNSNSSHLQLIYNLTLCELNGTDWLANKFD

SEQ ID NO: 757 - protein, 34 aa, Porcine reproductive and respiratory syndrome virus; identical to SEQ ID NO: 737

SEQ ID NO: 758 - protein, 34 aa, Porcine reproductive and respiratory syndrome virus
LVNANSNSSSHFQLIYNLTLCELNGTDWLDKHFY

SEQ ID NO: 759 - protein, 34 aa, Porcine reproductive and respiratory syndrome virus
LVNASNSSSSHLQLIYNLTICELNGTDWLNNKFD

SEQ ID NO: 760 - protein, 34 aa, Porcine reproductive and respiratory syndrome virus
LANASDNNSSHLQLIYNLTLCELNGTDWLANKFD

SEQ ID NO: 761 - protein, 34 aa, Porcine reproductive and respiratory syndrome virus; identical to SEQ ID NO: 267

SEQ ID NO: 762 - protein, 34 aa, Porcine reproductive and respiratory syndrome virus
LVNASNNGSSHLQLIYNLTLCELNGTDWLANKFD

SEQ ID NO: 763 - protein, 34 aa, Porcine reproductive and respiratory syndrome virus; identical to SEQ ID NO: 486

SEQ ID NO: 764 - protein, 34 aa, Porcine reproductive and respiratory syndrome virus; identical to SEQ ID NO: 717

SEQ ID NO: 765 - protein, 34 aa, Porcine reproductive and respiratory syndrome virus
LANASNNNSSHLQLIYNLTLCELNGTDWLANKFD

SEQ ID NO: 766 - protein, 34 aa, Porcine reproductive and respiratory syndrome virus; identical to SEQ ID NO: 765

SEQ ID NO: 767 - protein, 34 aa, Porcine reproductive and respiratory syndrome virus
LVNANNSSSSHFQLIYNLTLCELNGTDWIANHFS

SEQ ID NO: 768 - protein, 34 aa, Porcine reproductive and respiratory syndrome virus
LVNANSNSSSHLQLIYNLTICELNGTDWLNEHFS

SEQ ID NO: 769 - protein, 34 aa, Porcine reproductive and respiratory syndrome virus
LVNASNNSSSHLQLIYNLTICELNGTDWLGNKFD

SEQ ID NO: 770 - protein, 34 aa, Porcine reproductive and respiratory syndrome virus; identical to SEQ ID NO: 486

SEQ ID NO: 771 - protein, 34 aa, Porcine reproductive and respiratory syndrome virus; identical to SEQ ID NO: 463

SEQ ID NO: 772 - protein, 34 aa, Porcine reproductive and respiratory syndrome virus
LVNANSNSSSHLQLIYNLTICELNGTEWLDNRFS

SEQ ID NO: 773 - protein, 34 aa, Porcine reproductive and respiratory syndrome virus; identical to SEQ ID NO: 680

SEQ ID NO: 774 - protein, 34 aa, Porcine reproductive and respiratory syndrome virus; identical to SEQ ID NO: 483

SEQ ID NO: 775 - protein, 34 aa, Porcine reproductive and respiratory syndrome virus; identical to SEQ ID NO: 686

SEQ ID NO: 776 - protein, 34 aa, Porcine reproductive and respiratory syndrome virus; identical to SEQ ID NO: 483

SEQ ID NO: 777 - protein, 34 aa, Porcine reproductive and respiratory syndrome virus
LVNANSNSSSHFQSIYNLTLCELNGTDWLANKFD

SEQ ID NO: 778 - protein, 34 aa, Porcine reproductive and respiratory syndrome virus
  misc_feature (19)..(19): Xaa can be any naturally occurring amino acid
LVNANSNSSSHLQLIYNLXICELNGTDWLNNHFS

SEQ ID NO: 779 - protein, 34 aa, Porcine reproductive and respiratory syndrome virus; identical to SEQ ID NO: 778
  misc_feature (19)..(19): Xaa can be any naturally occurring amino acid

SEQ ID NO: 780 - protein, 34 aa, Porcine reproductive and respiratory syndrome virus; identical to SEQ ID NO: 267

SEQ ID NO: 781 - protein, 34 aa, Porcine reproductive and respiratory syndrome virus
IVNANSNSSSHFQLIYNLTICELNGTDWLNQKFD

SEQ ID NO: 782 - protein, 34 aa, Porcine reproductive and respiratory syndrome virus; identical to SEQ ID NO: 499

SEQ ID NO: 783 - protein, 34 aa, Porcine reproductive and respiratory syndrome virus; identical to SEQ ID NO: 267

SEQ ID NO: 784 - protein, 34 aa, Porcine reproductive and respiratory syndrome virus; identical to SEQ ID NO: 486

SEQ ID NO: 785 - protein, 34 aa, Porcine reproductive and respiratory syndrome virus
LANANNTSSSHLQLIYNLTLCELNGTDWLANKFD

SEQ ID NO: 786 - protein, 34 aa, Porcine reproductive and respiratory syndrome virus
LVNANSNSSSHFQLIYNLTLCELNGTDWLQGKFD

SEQ ID NO: 787 - protein, 34 aa, Porcine reproductive and respiratory syndrome virus; identical to SEQ ID NO: 486

SEQ ID NO: 788 - protein, 34 aa, Porcine reproductive and respiratory syndrome virus
LVNANSSSSSHFQLIYNLTLCELNGTDWLANHFD

SEQ ID NO: 789 - protein, 34 aa, Porcine reproductive and respiratory syndrome virus; identical to SEQ ID NO: 486

SEQ ID NO: 790 - protein, 34 aa, Porcine reproductive and respiratory syndrome virus
LANASTNSSSHLQLIYNLTLCELNGTDWLANKFD

SEQ ID NO: 791 - protein, 34 aa, Porcine reproductive and respiratory syndrome virus; identical to SEQ ID NO: 47

SEQ ID NO: 792 - protein, 34 aa, Porcine reproductive and respiratory syndrome virus
  misc_feature (5)..(5): Xaa can be any naturally occurring amino acid
LVNAXSNNSSHLQLIYNLTICELNGTDWLNNHFS

SEQ ID NO: 793 - protein, 34 aa, Porcine reproductive and respiratory syndrome virus; identical to SEQ ID NO: 483

SEQ ID NO: 794 - protein, 34 aa, Porcine reproductive and respiratory syndrome virus; identical to SEQ ID NO: 560

SEQ ID NO: 795 - protein, 34 aa, Porcine reproductive and respiratory syndrome virus
LVNASSNSSSHLQLIYNLTICELNGTDWLNNHFG

SEQ ID NO: 796 - protein, 34 aa, Porcine reproductive and respiratory syndrome virus
  misc_feature (22)..(22): Xaa can be any naturally occurring amino acid
  misc_feature (32)..(32): Xaa can be any naturally occurring amino acid
LVNANSNSSSHLQLIYNLTICXLNGTNWLNNXFS

SEQ ID NO: 797 - protein, 34 aa, Porcine reproductive and respiratory syndrome virus
  misc_feature (19)..(19): Xaa can be any naturally occurring amino acid
LVNASSNSSSHLQLIYSLXICELNGTDWLNNHFG

SEQ ID NO: 798 - protein, 34 aa, Porcine reproductive and respiratory syndrome virus
LVNAHSNSSSHLQLIYNLTICELNGTDWLNNRFS

SEQ ID NO: 799 - protein, 34 aa, Porcine reproductive and respiratory syndrome virus
LVNANSNSSSHFQLIYNLTLCELNGTDWLAKKFN

SEQ ID NO: 800 - protein, 34 aa, Porcine reproductive and respiratory syndrome virus; identical to SEQ ID NO: 188

SEQ ID NO: 801 - protein, 34 aa, Porcine reproductive and respiratory syndrome virus; identical to SEQ ID NO: 267

SEQ ID NO: 802 - protein, 34 aa, Porcine reproductive and respiratory syndrome virus
LANASGNSSSHLQLIYNLTLCELNGTDWLANKFD

SEQ ID NO: 803 - protein, 34 aa, Porcine reproductive and respiratory syndrome virus
LVNANSNSSSHLQLIYNLTICELNGTEWLNNQFS

SEQ ID NO: 804 - protein, 34 aa, Porcine reproductive and respiratory syndrome virus
LVDANSNSSSHFQLIYNLTLCELNGTDWLNNHFT

SEQ ID NO: 805 - protein, 34 aa, Porcine reproductive and respiratory syndrome virus
LVNANGNSSSHFQLIYNLTLCELNGTDWLENKFD

SEQ ID NO: 806 - protein, 34 aa, Porcine reproductive and respiratory syndrome virus
LANADSNSSSHLQLIYNLTLCELNGTDWLADKFD

SEQ ID NO: 807 - protein, 34 aa, Porcine reproductive and respiratory syndrome virus; identical to SEQ ID NO: 55

SEQ ID NO: 808 - protein, 34 aa, Porcine reproductive and respiratory syndrome virus
LVSANSNSSSHLQLIYNLTICELNGTDWLNNHFS

SEQ ID NO: 809 - protein, 34 aa, Porcine reproductive and respiratory syndrome virus; identical to SEQ ID NO: 696

SEQ ID NO: 810 - protein, 34 aa, Porcine reproductive and respiratory syndrome virus; identical to SEQ ID NO: 47

SEQ ID NO: 811 - protein, 34 aa, Porcine reproductive and respiratory syndrome virus
LVNANSNSSSHLQLIYNLTICELNGTDWLKDHFS

SEQ ID NO: 812 - protein, 34 aa, Porcine reproductive and respiratory syndrome virus
LVNAGSNSSSHLQLIYNLTICELNGTDWLKDHFN

SEQ ID NO: 813 - protein, 34 aa, Porcine reproductive and respiratory syndrome virus
LVNANSNNSSHLQLIYNLTICELNGTDWLBRHFG

SEQ ID NO: 814 - protein, 34 aa, Porcine reproductive and respiratory syndrome virus
LVNASNSSSSHFQLIYNLTLCELNGTDWLANKFD

SEQ ID NO: 815 - protein, 34 aa, Porcine reproductive and respiratory syndrome virus; identical to SEQ ID NO: 456

SEQ ID NO: 816 - protein, 34 aa, Porcine reproductive and respiratory syndrome virus
LVNADSNNSSHLQLIYNLTICELNGTDWLNKNFS

SEQ ID NO: 817 - protein, 34 aa, Porcine reproductive and respiratory syndrome virus; identical to SEQ ID NO: 786

SEQ ID NO: 818 - protein, 34 aa, Porcine reproductive and respiratory syndrome virus; identical to SEQ ID NO: 267

SEQ ID NO: 819 - protein, 34 aa, Porcine reproductive and respiratory syndrome virus
LVNAGSNSSSHLQLIYNLTICELNGTDWLNDHFS

SEQ ID NO: 820 - protein, 34 aa, Porcine reproductive and respiratory syndrome virus
LVNADNSSSSYSQLIYNLTLCELNGTDWLANKFD

SEQ ID NO: 821 - protein, 34 aa, Porcine reproductive and respiratory syndrome virus; identical to SEQ ID NO: 75

SEQ ID NO: 822 - protein, 34 aa, Porcine reproductive and respiratory syndrome virus
LVDANSNSSSHLQLIYNLTLCELNGTDWLNNKFD

SEQ ID NO: 823 - protein, 34 aa, Porcine reproductive and respiratory syndrome virus; identical to SEQ ID NO: 47

SEQ ID NO: 824 - protein, 34 aa, Porcine reproductive and respiratory syndrome virus; identical to SEQ ID NO: 486

SEQ ID NO: 825 - protein, 34 aa, Porcine reproductive and respiratory syndrome virus; identical to SEQ ID NO: 680

SEQ ID NO: 826 - protein, 34 aa, Porcine reproductive and respiratory syndrome virus; identical to SEQ ID NO: 267

SEQ ID NO: 827 - protein, 34 aa, Porcine reproductive and respiratory syndrome virus
LVNANSSSSSHIQLIYNLTLCELNGTDWLANKFD

SEQ ID NO: 828 - protein, 34 aa, Porcine reproductive and respiratory syndrome virus; identical to SEQ ID NO: 720

SEQ ID NO: 829 - protein, 34 aa, Porcine reproductive and respiratory syndrome virus; identical to SEQ ID NO: 267

SEQ ID NO: 830 - protein, 34 aa, Porcine reproductive and respiratory syndrome virus
LVNANSNSSSHFQLIYNLTICELNGTDWLNNHFS

SEQ ID NO: 831 - protein, 34 aa, Porcine reproductive and respiratory syndrome virus
IVNADSNSSSHLQLIYNLTICELNGTDWLNKKFD

SEQ ID NO: 832 - protein, 34 aa, Porcine reproductive and respiratory syndrome virus; identical to SEQ ID NO: 267

SEQ ID NO: 833 - protein, 34 aa, Porcine reproductive and respiratory syndrome virus; identical to SEQ ID NO: 656

SEQ ID NO: 834 - protein, 34 aa, Porcine reproductive and respiratory syndrome virus
  misc_feature (32)..(32): Xaa can be any naturally occurring amino acid
LVNADSNSSSHLQLIYNLTICELNGTDWLKNXFS

SEQ ID NO: 835 - protein, 34 aa, Porcine reproductive and respiratory syndrome virus
  misc_feature (31)..(31): Xaa can be any naturally occurring amino acid
LVNANSSSSSHIQLIYNLTLCELNGTDWLAXKFD

SEQ ID NO: 836 - protein, 34 aa, Porcine reproductive and respiratory syndrome virus; identical to SEQ ID NO: 798

SEQ ID NO: 837 - protein, 34 aa, Porcine reproductive and respiratory syndrome virus
LVNADSNSSSHLQLIYNLTICELNGTDWLNNHFG

SEQ ID NO: 838 - protein, 34 aa, Porcine reproductive and respiratory syndrome virus; identical to SEQ ID NO: 75

SEQ ID NO: 839 - protein, 34 aa, Porcine reproductive and respiratory syndrome virus
LVNANNDSSSHLQLIYNLTICELNGTDWLNDHFS

SEQ ID NO: 840 - protein, 33 aa, Porcine reproductive and respiratory syndrome virus
VNANSNSSSHFQLIYNLTLCELNGTDWLASHFN

SEQ ID NO: 841 - protein, 34 aa, Porcine reproductive and respiratory syndrome virus; identical to SEQ ID NO: 267

SEQ ID NO: 842 - protein, 34 aa, Porcine reproductive and respiratory syndrome virus
LVNADSNNSSHLQLIYNLTICELNGTDWLNKNFG

SEQ ID NO: 843 - protein, 34 aa, Porcine reproductive and respiratory syndrome virus
LVNASSNSSSHLQLIYNLTICELNGTDWLNNKFD

SEQ ID NO: 844 - protein, 34 aa, Porcine reproductive and respiratory syndrome virus; identical to SEQ ID NO: 598

SEQ ID NO: 845 - protein, 34 aa, Porcine reproductive and respiratory syndrome virus; identical to SEQ ID NO: 798

SEQ ID NO: 846 - protein, 34 aa, Porcine reproductive and respiratory syndrome virus
LANANSNSSSHLQLIYNLTLCELNGTDWLABKFD

SEQ ID NO: 847 - protein, 34 aa, Porcine reproductive and respiratory syndrome virus; identical to SEQ ID NO: 47

SEQ ID NO: 848 - protein, 34 aa, Porcine reproductive and respiratory syndrome virus
IVNANSNSSSHIQLIYNLTLCELNGTDWLANKFD

SEQ ID NO: 849 - protein, 34 aa, Porcine reproductive and respiratory syndrome virus
LVNASSNSSSHLQLIYNLTICELNGTDWLGNEFD

SEQ ID NO: 850 - protein, 34 aa, Porcine reproductive and respiratory syndrome virus
LVNASSNSSSHLQLIYNLTLCELNGTDWLADRFD

SEQ ID NO: 851 - protein, 34 aa, Porcine reproductive and respiratory syndrome virus; identical to SEQ ID NO: 188

SEQ ID NO: 852 - protein, 34 aa, Porcine reproductive and respiratory syndrome virus; identical to SEQ ID NO: 75

SEQ ID NO: 853 - protein, 34 aa, Porcine reproductive and respiratory syndrome virus
LVNASSNSSSHFQLIYNLTLCELNGTDWLAEHFD

SEQ ID NO: 854 - protein, 34 aa, Porcine reproductive and respiratory syndrome virus; identical to SEQ ID NO: 696

SEQ ID NO: 855 - protein, 34 aa, Porcine reproductive and respiratory syndrome virus
LVNANSNSSSHFQLIYNLTICELNGTDWLDQKFD

SEQ ID NO: 856 - protein, 34 aa, Porcine reproductive and respiratory syndrome virus
LVNADSNSSSHLQLIYNLPICELNGTDWLNNHFS

SEQ ID NO: 857 - protein, 34 aa, Porcine reproductive and respiratory syndrome virus; identical to SEQ ID NO: 717

SEQ ID NO: 858 - protein, 34 aa, Porcine reproductive and respiratory syndrome virus
LVNANNSSSSHFQLIYNLTLCELNGTDWLANKFD

SEQ ID NO: 859 - protein, 34 aa, Porcine reproductive and respiratory syndrome virus
PVNANTNNSSKLQLIYNLTLCELNGTDWLADRFN

SEQ ID NO: 860 - protein, 34 aa, Porcine reproductive and respiratory syndrome virus
LVNANNSSSSHLQLIYNLTLCELNGTDWLADKFD

SEQ ID NO: 861 - protein, 34 aa, Porcine reproductive and respiratory syndrome virus
LVNANSSSSSHIQLIYNLTLCELNGTDWLADRFD

SEQ ID NO: 862 - protein, 34 aa, Porcine reproductive and respiratory syndrome virus
LVNANSNSSSHLQLIYNLTLCELNGTDWLRDKFD

SEQ ID NO: 863 - protein, 34 aa, Porcine reproductive and respiratory syndrome virus; identical to SEQ ID NO: 713

SEQ ID NO: 864 - protein, 34 aa, Porcine reproductive and respiratory syndrome virus; identical to SEQ ID NO: 47

SEQ ID NO: 865 - protein, 34 aa, Porcine reproductive and respiratory syndrome virus; identical to SEQ ID NO: 267

SEQ ID NO: 866 - protein, 34 aa, Porcine reproductive and respiratory syndrome virus
IVNASSNSSSHIQLIYNLTLCELNGTDWLADKFD

SEQ ID NO: 867 - protein, 34 aa, Porcine reproductive and respiratory syndrome virus
LVNANSNSSSHLQLIYNLTICELNGTDWLNNKFD

SEQ ID NO: 868 - protein, 34 aa, Porcine reproductive and respiratory syndrome virus
FVSASANSSSHLQLIYNLTICELNGTDWLNEHFG

SEQ ID NO: 869 - protein, 34 aa, Porcine reproductive and respiratory syndrome virus; identical to SEQ ID NO: 75

SEQ ID NO: 870 - protein, 34 aa, Porcine reproductive and respiratory syndrome virus
LDNADSNSSSHLQLIYNLTICELNGTDWLNNHFS

SEQ ID NO: 871 - protein, 34 aa, Porcine reproductive and respiratory syndrome virus; identical to SEQ ID NO: 236

SEQ ID NO: 872 - protein, 34 aa, Porcine reproductive and respiratory syndrome virus; identical to SEQ ID NO: 484

SEQ ID NO: 873 - protein, 34 aa, Porcine reproductive and respiratory syndrome virus
LVNASNNSSSHLQLIYNLTICELNGTDWLBNTFD

SEQ ID NO: 874 - protein, 34 aa, Porcine reproductive and respiratory syndrome virus
LVNASGNSSSHLQLIYNLTICELNGTDWLNNHFS

SEQ ID NO: 875 - protein, 34 aa, Porcine reproductive and respiratory syndrome virus; identical to SEQ ID NO: 55

SEQ ID NO: 876 - protein, 34 aa, Porcine reproductive and respiratory syndrome virus
LVNADSNNSSHLQLIYNLTICELNGTDWLDKHFS

SEQ ID NO: 877 - protein, 34 aa, Porcine reproductive and respiratory syndrome virus
  misc_feature (17)..(17): Xaa can be any naturally occurring amino acid
LANASBNSSSHLQLIYXLTLCELNGTDWLANKFD

SEQ ID NO: 878 - protein, 34 aa, Porcine reproductive and respiratory syndrome virus
LVNASNNSSSHLQLIYNLTICELNGTDWLNKSFD

SEQ ID NO: 879 - protein, 34 aa, Porcine reproductive and respiratory syndrome virus
LVNANSSGSSHLQSIYNLTICELNGTDWLNNHFS

SEQ ID NO: 880 - protein, 34 aa, Porcine reproductive and respiratory syndrome virus
LVNANSNSSSHFQLIYNLTLCELNGTDWLAEKFN

SEQ ID NO: 881 - protein, 34 aa, Porcine reproductive and respiratory syndrome virus; identical to SEQ ID NO: 47

SEQ ID NO: 882 - protein, 34 aa, Porcine reproductive and respiratory syndrome virus
LVNANSNSSSHLQSIYNLTICELNGTHWLNNHFS

SEQ ID NO: 883 - protein, 34 aa, Porcine reproductive and respiratory syndrome virus; identical to SEQ ID NO: 39

SEQ ID NO: 884 - protein, 34 aa, Porcine reproductive and respiratory syndrome virus; identical to SEQ ID NO: 75

SEQ ID NO: 885 - protein, 34 aa, Porcine reproductive and respiratory syndrome virus; identical to SEQ ID NO: 663

SEQ ID NO: 886 - protein, 34 aa, Porcine reproductive and respiratory syndrome virus
LVNASNNNSSHLQLIYNLTICELNGTDWLDKHFS

SEQ ID NO: 887 - protein, 34 aa, Porcine reproductive and respiratory syndrome virus; identical to SEQ ID NO: 874

SEQ ID NO: 888 - protein, 34 aa, Porcine reproductive and respiratory syndrome virus
IVNAGSNSSSHIQLIYNLTLCELNGTDWLAGKFD

SEQ ID NO: 889 - protein, 34 aa, Porcine reproductive and respiratory syndrome virus
LVNANSNSSSHLQLIYNLTICELNGTNWLNNHFS

SEQ ID NO: 890 - protein, 34 aa, Porcine reproductive and respiratory syndrome virus; identical to SEQ ID NO: 886

SEQ ID NO: 891 - protein, 34 aa, Porcine reproductive and respiratory syndrome virus; identical to SEQ ID NO: 55

SEQ ID NO: 892 - protein, 34 aa, Porcine reproductive and respiratory syndrome virus; identical to SEQ ID NO: 483

SEQ ID NO: 893 - protein, 34 aa, Porcine reproductive and respiratory syndrome virus
LVNASGNSSSHFQLIYNLTLCELNGTDWLAEKFD

SEQ ID NO: 894 - protein, 34 aa, Porcine reproductive and respiratory syndrome virus
LANASANSSSHFQLIYNLTLCELNGTDWLANKFD

SEQ ID NO: 895 - protein, 34 aa, Porcine reproductive and respiratory syndrome virus; identical to SEQ ID NO: 876

SEQ ID NO: 896 - protein, 34 aa, Porcine reproductive and respiratory syndrome virus; identical to SEQ ID NO: 886

SEQ ID NO: 897 - protein, 34 aa, Porcine reproductive and respiratory syndrome virus
LVNASGNSSSHFQLIYNLTLCELNGTDWLAERFD

SEQ ID NO: 898 - protein, 34 aa, Porcine reproductive and respiratory syndrome virus
LVNANSTSSSHFQLIYNLTLCELNGTDWLAKKFD

SEQ ID NO: 899 - protein, 34 aa, Porcine reproductive and respiratory syndrome virus
LVNASGNSSSHFQLIYNLTLCELNGTDWLAKKFD

SEQ ID NO: 900 - protein, 34 aa, Porcine reproductive and respiratory syndrome virus; identical to SEQ ID NO: 47

SEQ ID NO: 901 - protein, 34 aa, Porcine reproductive and respiratory syndrome virus; identical to SEQ ID NO: 656

SEQ ID NO: 902 - protein, 34 aa, Porcine reproductive and respiratory syndrome virus; identical to SEQ ID NO: 680

SEQ ID NO: 903 - protein, 34 aa, Porcine reproductive and respiratory syndrome virus
LVNADSNHSSHFQSIYNLTLCELNGTDWLAKKFD

SEQ ID NO: 904 - protein, 34 aa, Porcine reproductive and respiratory syndrome virus; identical to SEQ ID NO: 267

SEQ ID NO: 905 - protein, 34 aa, Porcine reproductive and respiratory syndrome virus; identical to SEQ ID NO: 486

SEQ ID NO: 906 - protein, 34 aa, Porcine reproductive and respiratory syndrome virus
LVNADSNSSSHLQLIYNLTICELNGTEWLNNRFS

SEQ ID NO: 907 - protein, 34 aa, Porcine reproductive and respiratory syndrome virus
IANANSNSSSHIQLIYNLTLCELNGTDWLAGKFD

SEQ ID NO: 908 - protein, 34 aa, Porcine reproductive and respiratory syndrome virus; identical to SEQ ID NO: 39

SEQ ID NO: 909 - protein, 34 aa, Porcine reproductive and respiratory syndrome virus; identical to SEQ ID NO: 740

SEQ ID NO: 910 - protein, 34 aa, Porcine reproductive and respiratory syndrome virus
LVNANSNSSSHIQLIYNLTLCELNGTDWLANKFD

SEQ ID NO: 911 - protein, 34 aa, Porcine reproductive and respiratory syndrome virus; identical to SEQ ID NO: 47

SEQ ID NO: 912 - protein, 34 aa, Porcine reproductive and respiratory syndrome virus; identical to SEQ ID NO: 256

SEQ ID NO: 913 - protein, 34 aa, Porcine reproductive and respiratory syndrome virus; identical to SEQ ID NO: 499

SEQ ID NO: 914 - protein, 34 aa, Porcine reproductive and respiratory syndrome virus; identical to SEQ ID NO: 473

SEQ ID NO: 915 - protein, 34 aa, Porcine reproductive and respiratory syndrome virus; identical to SEQ ID NO: 694

SEQ ID NO: 916 - protein, 34 aa, Porcine reproductive and respiratory syndrome virus; identical to SEQ ID NO: 878

SEQ ID NO: 917 - protein, 34 aa, Porcine reproductive and respiratory syndrome virus
PVNANSNSSSHLQLIYNLTICELNGTDWLDRKFD

SEQ ID NO: 918 - protein, 34 aa, Porcine reproductive and respiratory syndrome virus
LVNASGNSSSHFQLIYNLTICELNGTDWLNDHFS

SEQ ID NO: 919 - protein, 34 aa, Porcine reproductive and respiratory syndrome virus; identical to SEQ ID NO: 449

SEQ ID NO: 920 - protein, 34 aa, Porcine reproductive and respiratory syndrome virus; identical to SEQ ID NO: 680

SEQ ID NO: 921 - protein, 34 aa, Porcine reproductive and respiratory syndrome virus
  misc_feature (14)..(14): Xaa can be any naturally occurring amino acid
LVNANSNSSSHLQXIYNLTICELNGTDWLNEHFS

SEQ ID NO: 922 - protein, 34 aa, Porcine reproductive and respiratory syndrome virus
  misc_feature (8)..(8): Xaa can be any naturally occurring amino acid
LVNANNSXSSHLQLIYNLTLCELNGTDWLANKFD

SEQ ID NO: 923 - protein, 34 aa, Porcine reproductive and respiratory syndrome virus; identical to SEQ ID NO: 486

SEQ ID NO: 924 - protein, 34 aa, Porcine reproductive and respiratory syndrome virus; identical to SEQ ID NO: 819

SEQ ID NO: 925 - protein, 34 aa, Porcine reproductive and respiratory syndrome virus; identical to SEQ ID NO: 680

SEQ ID NO: 926 - protein, 34 aa, Porcine reproductive and respiratory syndrome virus; identical to SEQ ID NO: 486

SEQ ID NO: 927 - protein, 34 aa, Porcine reproductive and respiratory syndrome virus; identical to SEQ ID NO: 486

SEQ ID NO: 928 - protein, 34 aa, Porcine reproductive and respiratory syndrome virus
LVNASTSSSSHLQLIYNLTICELNGTDWLGNHFS

SEQ ID NO: 929 - protein, 34 aa, Porcine reproductive and respiratory syndrome virus; identical to SEQ ID NO: 659

SEQ ID NO: 930 - protein, 34 aa, Porcine reproductive and respiratory syndrome virus
LANASSNNSSHLQLIYNLTLCELNGTDWLVNKFD

SEQ ID NO: 931 - protein, 34 aa, Porcine reproductive and respiratory syndrome virus; identical to SEQ ID NO: 680

SEQ ID NO: 932 - protein, 34 aa, Porcine reproductive and respiratory syndrome virus
  misc_feature (30)..(30): Xaa can be any naturally occurring amino acid
PANANNDSSSHLQLIYNLTLCELNGTDWLXNRFD

SEQ ID NO: 933 - protein, 34 aa, Porcine reproductive and respiratory syndrome virus
LANAHSNSSSHLQLIYNLTICELNGTDWLNKHFS

SEQ ID NO: 934 - protein, 34 aa, Porcine reproductive and respiratory syndrome virus
LVSANQNNSSHLQLIYNLTLCELNGTDWLANKFD

SEQ ID NO: 935 - protein, 34 aa, Porcine reproductive and respiratory syndrome virus
LVNASNGSSSHLQLIYNLTLCELNGTDWLATKFD

SEQ ID NO: 936 - protein, 34 aa, Porcine reproductive and respiratory syndrome virus
LVNASNSSSSHLQLIYNLTICELNGTDWLKNHFS

SEQ ID NO: 937 - protein, 34 aa, Porcine reproductive and respiratory syndrome virus; identical to SEQ ID NO: 755

SEQ ID NO: 938 - protein, 33 aa, Porcine reproductive and respiratory syndrome virus
VNANANSSSKLQLIYNLTLCELNGTDWLANKFD

SEQ ID NO: 939 - protein, 34 aa, Porcine reproductive and respiratory syndrome virus
LVNASSNSSSHLQLIYNLTICELNGTDWLENHFS

SEQ ID NO: 940 - protein, 34 aa, Porcine reproductive and respiratory syndrome virus
  misc_feature (6)..(6): Xaa can be any naturally occurring amino acid
  misc_feature (27)..(27): Xaa can be any naturally occurring amino acid
LVNASXNSSSHLQLIYNLTICELNGTXWLENHFS

SEQ ID NO: 941 - protein, 34 aa, Porcine reproductive and respiratory syndrome virus; identical to SEQ ID NO: 267

SEQ ID NO: 942 - protein, 34 aa, Porcine reproductive and respiratory syndrome virus
PVNANSNSSSHLQLIYNLTICELNGTDWLNEHFS

SEQ ID NO: 943 - protein, 34 aa, Porcine reproductive and respiratory syndrome virus
LVNANSNSSSHLQLIYNLTICELNGTDWLDKHFS

SEQ ID NO: 944 - protein, 34 aa, Porcine reproductive and respiratory syndrome virus
LVNANSNSSSHFQLIYKLTLCELNGTDWLAKKFD

SEQ ID NO: 945 - protein, 34 aa, Porcine reproductive and respiratory syndrome virus
LVNANSNSSSHLQLIYNLTICELNGTDWLNKHFS

SEQ ID NO: 946 - protein, 34 aa, Porcine reproductive and respiratory syndrome virus; identical to SEQ ID NO: 803

SEQ ID NO: 947 - protein, 34 aa, Porcine reproductive and respiratory syndrome virus; identical to SEQ ID NO: 694

SEQ ID NO: 948 - protein, 34 aa, Porcine reproductive and respiratory syndrome virus
LVGANSNSSSHFQLIYNLTLCELNGTDWLDNKFD

SEQ ID NO: 949 - protein, 34 aa, Porcine reproductive and respiratory syndrome virus
LVNAHSNSSSHLQLIYNLTICELNGTDWLNKHFS

SEQ ID NO: 950 - protein, 34 aa, Porcine reproductive and respiratory syndrome virus
LVNADNNSSSHLQLIYNLTICELNGTDWLNKKFD

SEQ ID NO: 951 - protein, 34 aa, Porcine reproductive and respiratory syndrome virus
LVNADNNSSSHLQLIYNLTICELNGTEWLNKKFD

SEQ ID NO: 952 - protein, 34 aa, Porcine reproductive and respiratory syndrome virus
IVNANSNSSSHIQLIYNLTLCELNGTDWLADKFD

SEQ ID NO: 953 - protein, 34 aa, Porcine reproductive and respiratory syndrome virus; identical to SEQ ID NO: 933

SEQ ID NO: 954 - protein, 34 aa, Porcine reproductive and respiratory syndrome virus; identical to SEQ ID NO: 802

SEQ ID NO: 955 - protein, 34 aa, Porcine reproductive and respiratory syndrome virus; identical to SEQ ID NO: 486

SEQ ID NO: 956 - protein, 34 aa, Porcine reproductive and respiratory syndrome virus
LVNADSSNSSHLQLIYNLTICELNGTDWLDRHFS

SEQ ID NO: 957 - protein, 34 aa, Porcine reproductive and respiratory syndrome virus; identical to SEQ ID NO: 874

SEQ ID NO: 958 - protein, 34 aa, Porcine reproductive and respiratory syndrome virus
LVNAGSNSSSHLQLIYNLTICELNGTEWLBNHFS

SEQ ID NO: 959 - protein, 34 aa, Porcine reproductive and respiratory syndrome virus
LVNANSSSSSHFQLIYNLTICELNGTDWLNDHFS

SEQ ID NO: 960 - protein, 34 aa, Porcine reproductive and respiratory syndrome virus
LVDANSNSSSHFQLIYNLTLCELNGTDWLNDKFN

SEQ ID NO: 961 - protein, 34 aa, Porcine reproductive and respiratory syndrome virus; identical to SEQ ID NO: 267

SEQ ID NO: 962 - protein, 34 aa, Porcine reproductive and respiratory syndrome virus
LVNADSNSSSHLQSIYNLTICELNGTDWLNNHFS

SEQ ID NO: 963 - protein, 34 aa, Porcine reproductive and respiratory syndrome virus
PANAGDSSSSHLQLIYNLTLCELNGTDWLANKFD

SEQ ID NO: 964 - protein, 34 aa, Porcine reproductive and respiratory syndrome virus
LANASSDSSSHLQLIYNLTLCELNGTDWLADKFD

SEQ ID NO: 965 - protein, 34 aa, Porcine reproductive and respiratory syndrome virus
LVNASNNNSSHLQLIYNLTICELNGTDWLNEHFS

SEQ ID NO: 966 - protein, 34 aa, Porcine reproductive and respiratory syndrome virus; identical to SEQ ID NO: 933

SEQ ID NO: 967 - protein, 34 aa, Porcine reproductive and respiratory syndrome virus
LVNASNNASSHLQLIYNLTICELNGTDWLNKHFS

SEQ ID NO: 968 - protein, 34 aa, Porcine reproductive and respiratory syndrome virus
LVNANNNSSSHLQLIYNLTICELNGTDWLNDHFR

SEQ ID NO: 969 - protein, 34 aa, Porcine reproductive and respiratory syndrome virus; identical to SEQ ID NO: 945

SEQ ID NO: 970 - protein, 34 aa, Porcine reproductive and respiratory syndrome virus
LVNANSNSSSHFQLIYNLTLCELNGTDWLATRFD

SEQ ID NO: 971 - protein, 34 aa, Porcine reproductive and respiratory syndrome virus
  misc_feature (27)..(27): Xaa can be any naturally occurring amino acid
LVNASNNTSSHLQLIYNLTICELNGTXWLNKHFN

SEQ ID NO: 972 - protein, 34 aa, Porcine reproductive and respiratory syndrome virus; identical to SEQ ID NO: 945

SEQ ID NO: 973 - protein, 34 aa, Porcine reproductive and respiratory syndrome virus; identical to SEQ ID NO: 907

SEQ ID NO: 974 - protein, 34 aa, Porcine reproductive and respiratory syndrome virus
LVNAGSNSSSHLQLIYNLTICELNGTGWLNNHFS

SEQ ID NO: 975 - protein, 34 aa, Porcine reproductive and respiratory syndrome virus; identical to SEQ ID NO: 267

SEQ ID NO: 976 - protein, 34 aa, Porcine reproductive and respiratory syndrome virus; identical to SEQ ID NO: 55

SEQ ID NO: 977 - protein, 34 aa, Porcine reproductive and respiratory syndrome virus; identical to SEQ ID NO: 449

SEQ ID NO: 978 - protein, 34 aa, Porcine reproductive and respiratory syndrome virus; identical to SEQ ID NO: 827

SEQ ID NO: 979 - protein, 34 aa, Porcine reproductive and respiratory syndrome virus; identical to SEQ ID NO: 819

SEQ ID NO: 980 - protein, 34 aa, Porcine reproductive and respiratory syndrome virus; identical to SEQ ID NO: 720

SEQ ID NO: 981 - protein, 34 aa, Porcine reproductive and respiratory syndrome virus
LVNAHSNSSSHLQLIYNLTICELNGTDWLDKHFS

SEQ ID NO: 982 - protein, 34 aa, Porcine reproductive and respiratory syndrome virus; identical to SEQ ID NO: 47

SEQ ID NO: 983 - protein, 34 aa, Porcine reproductive and respiratory syndrome virus; identical to SEQ ID NO: 235

SEQ ID NO: 984 - protein, 34 aa, Porcine reproductive and respiratory syndrome virus
LVNASNNSSSHLQLIYNLTICELNGTEWLNNHFS

SEQ ID NO: 985 - protein, 34 aa, Porcine reproductive and respiratory syndrome virus
SFADGNGNNSTYQYIYNLTICELNGTDWLSDHFS

SEQ ID NO: 986 - protein, 34 aa, Porcine reproductive and respiratory syndrome virus; identical to SEQ ID NO: 486

SEQ ID NO: 987 - protein, 34 aa, Porcine reproductive and respiratory syndrome virus
LANAHSNSSSHLQLIYNLTICELNGTDWLDKHFS

SEQ ID NO: 988 - protein, 34 aa, Porcine reproductive and respiratory syndrome virus
LVNANSSSSSHLQLIYNLTICELNGTDWLKDKFE

SEQ ID NO: 989 - protein, 34 aa, Porcine reproductive and respiratory syndrome virus
LVNASNNNSSHLQLIYNLTICELNGTDWLNSHFS

SEQ ID NO: 990 - protein, 34 aa, Porcine reproductive and respiratory syndrome virus
LVNANSNSSSHLQLIYNLTICELNGTEWLNNKFS

SEQ ID NO: 991 - protein, 34 aa, Porcine reproductive and respiratory syndrome virus; identical to SEQ ID NO: 267

SEQ ID NO: 992 - protein, 34 aa, Porcine reproductive and respiratory syndrome virus
LVNANSNSSSHFQLIYNLTLCELNGTDWLNKKFD

SEQ ID NO: 993 - protein, 34 aa, Porcine reproductive and respiratory syndrome virus
LVNANGNSSSHFQLIYNLTLCELNGTEWLGNKFD

SEQ ID NO: 994 - protein, 34 aa, Porcine reproductive and respiratory syndrome virus
LVNANSNSSSHFQSIYNLTLCELNGTDWLAGKFD

SEQ ID NO: 995 - protein, 34 aa, Porcine reproductive and respiratory syndrome virus; identical to SEQ ID NO: 743

SEQ ID NO: 996 - protein, 34 aa, Porcine reproductive and respiratory syndrome virus
LVNASNNSSSHLQLIYNLTICELNGTDWLNNHFS

SEQ ID NO: 997 - protein, 34 aa, Porcine reproductive and respiratory syndrome virus; identical to SEQ ID NO: 686

SEQ ID NO: 998 - protein, 34 aa, Porcine reproductive and respiratory syndrome virus; identical to SEQ ID NO: 910

SEQ ID NO: 999 - protein, 33 aa, Porcine reproductive and respiratory syndrome virus
LVNASNSSSHFQLIYNLTLCELNGTDWLANKFD

SEQ ID NO: 1000 - protein, 34 aa, Porcine reproductive and respiratory syndrome virus
IVNASSNSSSHIQLIYNLTICELNGTDWLNYKFD

SEQ ID NO: 1001 - protein, 34 aa, Porcine reproductive and respiratory syndrome virus
LVDANSNSSSHLQLIYNLTICELNGTDWLKNNFD

SEQ ID NO: 1002 - protein, 34 aa, Porcine reproductive and respiratory syndrome virus
LVNANSNSSSHFQLIYNLTLCELNGTDWLAERFD

SEQ ID NO: 1003 - protein, 34 aa, Porcine reproductive and respiratory syndrome virus; identical to SEQ ID NO: 996

SEQ ID NO: 1004 - protein, 34 aa, Porcine reproductive and respiratory syndrome virus; identical to SEQ ID NO: 910

SEQ ID NO: 1005 - protein, 34 aa, Porcine reproductive and respiratory syndrome virus
LVNANSTSSSHFQLIYNLTLCELNGTDWLANKFD

SEQ ID NO: 1006 - protein, 34 aa, Porcine reproductive and respiratory syndrome virus; identical to SEQ ID NO: 229

SEQ ID NO: 1007 - protein, 34 aa, Porcine reproductive and respiratory syndrome virus
LVNANSNNSSHLQLIYNLTICELNGTDWLDKKFD

SEQ ID NO: 1008 - protein, 34 aa, Porcine reproductive and respiratory syndrome virus; identical to SEQ ID NO: 20

SEQ ID NO: 1009 - protein, 34 aa, Porcine reproductive and respiratory syndrome virus
LVNASSNNSSHLQLIYNLTICELNGTDWLDKRFS

SEQ ID NO: 1010 - protein, 34 aa, Porcine reproductive and respiratory syndrome virus; identical to SEQ ID NO: 350

SEQ ID NO: 1011 - protein, 34 aa, Porcine reproductive and respiratory syndrome virus; identical to SEQ ID NO: 484

SEQ ID NO: 1012 - protein, 34 aa, Porcine reproductive and respiratory syndrome virus
LVNASGNSSSHFQLIYNLTICELNGTEWLDDHFS

SEQ ID NO: 1013 - protein, 34 aa, Porcine reproductive and respiratory syndrome virus
LVNADSNSSSHLQLIYNLTICELNGTDWLNKNFS

SEQ ID NO: 1014 - protein, 34 aa, Porcine reproductive and respiratory syndrome virus; identical to SEQ ID NO: 188

SEQ ID NO: 1015 - protein, 34 aa, Porcine reproductive and respiratory syndrome virus; identical to SEQ ID NO: 936

SEQ ID NO: 1016 - protein, 34 aa, Porcine reproductive and respiratory syndrome virus
LANANSNSSSHLQLIYNLTLCELNGTDWLVGKFD

SEQ ID NO: 1017 - protein, 34 aa, Porcine reproductive and respiratory syndrome virus
LVNANSNSSSHLQLIYNLTICELNGTDWLNDKFD

SEQ ID NO: 1018 - protein, 34 aa, Porcine reproductive and respiratory syndrome virus; identical to SEQ ID NO: 188

SEQ ID NO: 1019 - protein, 34 aa, Porcine reproductive and respiratory syndrome virus; identical to SEQ ID NO: 768

SEQ ID NO: 1020 - protein, 34 aa, Porcine reproductive and respiratory syndrome virus
LVNATSNSSSHLQLIYNLTLCELNGTDWLGEKFD

SEQ ID NO: 1021 - protein, 34 aa, Porcine reproductive and respiratory syndrome virus
LVNASSNNSSHLQLIYNLTICELNGTEWLNNHFS

SEQ ID NO: 1022 - protein, 34 aa, Porcine reproductive and respiratory syndrome virus
LVNANSNSSSHLQLIYNLTICELNGTDWLKNHFS

SEQ ID NO: 1023 - protein, 34 aa, Porcine reproductive and respiratory syndrome virus
LVNANGNSSSHLQLIYNLTLCELNGTDWLAKRFD

SEQ ID NO: 1024 - protein, 34 aa, Porcine reproductive and respiratory syndrome virus; identical to SEQ ID NO: 39

SEQ ID NO: 1025 - protein, 34 aa, Porcine reproductive and respiratory syndrome virus
LVNANSNSSSHLQLIYNLTICELNGTDWLYNHFS

SEQ ID NO: 1026 - protein, 34 aa, Porcine reproductive and respiratory syndrome virus
LVNASGNSSSHLQLIYNLTICELNGTEWLGNHFS

SEQ ID NO: 1027 - protein, 34 aa, Porcine reproductive and respiratory syndrome virus; identical to SEQ ID NO: 188

SEQ ID NO: 1028 - protein, 34 aa, Porcine reproductive and respiratory syndrome virus; identical to SEQ ID NO: 604

SEQ ID NO: 1029 - protein, 34 aa, Porcine reproductive and respiratory syndrome virus
LVNASSNSSSHLQLIYNLTICELNGTDWLDKRFD

SEQ ID NO: 1030 - protein, 34 aa, Porcine reproductive and respiratory syndrome virus; identical to SEQ ID NO: 910

SEQ ID NO: 1031 - protein, 34 aa, Porcine reproductive and respiratory syndrome virus
LVNASNNSSSHLQLIYNLTICELNGTDWLNEHFS

SEQ ID NO: 1032 - protein, 34 aa, Porcine reproductive and respiratory syndrome virus; identical to SEQ ID NO: 694

SEQ ID NO: 1033 - protein, 34 aa, Porcine reproductive and respiratory syndrome virus
  misc_feature (5)..(6): Xaa can be any naturally occurring amino acid
LVNAXXNSSSHLQLIYNLTICELNGTDWLNNHFS

SEQ ID NO: 1034 - protein, 34 aa, Porcine reproductive and respiratory syndrome virus; identical to SEQ ID NO: 680

SEQ ID NO: 1035 - protein, 34 aa, Porcine reproductive and respiratory syndrome virus
  misc_feature (30)..(30): Xaa can be any naturally occurring amino acid
LVNAGSNSSSHLQLIYNLTICELNGTDWLXDHFS

SEQ ID NO: 1036 - protein, 34 aa, Porcine reproductive and respiratory syndrome virus
IVNASNDSSSHLQLIYNLTICELNGTEWLNNHFS

SEQ ID NO: 1037 - protein, 34 aa, Porcine reproductive and respiratory syndrome virus
LVNANSBSSSHIQLIYNLTLCELNGTDWLANKFD

SEQ ID NO: 1038 - protein, 34 aa, Porcine reproductive and respiratory syndrome virus
LVNANSNSSSHLQLIYKLTICELNGTDWLNEHFS

SEQ ID NO: 1039 - protein, 34 aa, Porcine reproductive and respiratory syndrome virus
LVNASGNSSSHFQLIYNLTLCELNGTDWLADKFD

SEQ ID NO: 1040 - protein, 34 aa, Porcine reproductive and respiratory syndrome virus
LVNAHSNSSSHLQLIYNLTICELNGTDWLNNHFS

SEQ ID NO: 1041 - protein, 34 aa, Porcine reproductive and respiratory syndrome virus
  misc_feature (32)..(32): Xaa can be any naturally occurring amino acid
LVNANSNSSSHLQLIYNLTICELNGTDWLNNXFS

SEQ ID NO: 1042 - protein, 34 aa, Porcine reproductive and respiratory syndrome virus; identical to SEQ ID NO: 484

SEQ ID NO: 1043 - protein, 34 aa, Porcine reproductive and respiratory syndrome virus
LVNANNTSSSHFQLIYNLTLCELNGTDWLANKFD

SEQ ID NO: 1044 - protein, 34 aa, Porcine reproductive and respiratory syndrome virus; identical to SEQ ID NO: 486

SEQ ID NO: 1045 - protein, 34 aa, Porcine reproductive and respiratory syndrome virus
LVNANSNSSSHLQLIYNLTICELNGTDWLNNRFS

SEQ ID NO: 1046 - protein, 34 aa, Porcine reproductive and respiratory syndrome virus
LVNANSNSSSHFQLIYNLTICELNGTDWLSNKFD

SEQ ID NO: 1047 - protein, 34 aa, Porcine reproductive and respiratory syndrome virus; identical to SEQ ID NO: 943

SEQ ID NO: 1048 - protein, 34 aa, Porcine reproductive and respiratory syndrome virus; identical to SEQ ID NO: 350

SEQ ID NO: 1049 - protein, 34 aa, Porcine reproductive and respiratory syndrome virus
LVNANNNSSSHLQLIYNLTICELNGTDWLNKSFD

SEQ ID NO: 1050 - protein, 34 aa, Porcine reproductive and respiratory syndrome virus; identical to SEQ ID NO: 786

SEQ ID NO: 1051 - protein, 34 aa, Porcine reproductive and respiratory syndrome virus; identical to SEQ ID NO: 188

SEQ ID NO: 1052 - protein, 34 aa, Porcine reproductive and respiratory syndrome virus
LVNANSNSSSHFQLIYNLTLCELNGTEWLGNKFD

SEQ ID NO: 1053 - protein, 34 aa, Porcine reproductive and respiratory syndrome virus; identical to SEQ ID NO: 267

SEQ ID NO: 1054 - protein, 34 aa, Porcine reproductive and respiratory syndrome virus
LVNAHSNSSSHLQLIYNLTICELNGTEWLNNHFS

SEQ ID NO: 1055 - protein, 34 aa, Porcine reproductive and respiratory syndrome virus; identical to SEQ ID NO: 486

SEQ ID NO: 1056 - protein, 34 aa, Porcine reproductive and respiratory syndrome virus
LANANSNSSSHLQLIYNLTLCELNGTDWLADKFD

SEQ ID NO: 1057 - protein, 34 aa, Porcine reproductive and respiratory syndrome virus
LVNASNDSSSHLQLIYNLTICELNGTDWLNNKFD

SEQ ID NO: 1058 - protein, 34 aa, Porcine reproductive and respiratory syndrome virus
LVNANSNSSSHFQLIYNLTICELNGTDWLNEHFS

SEQ ID NO: 1059 - protein, 34 aa, Porcine reproductive and respiratory syndrome virus; identical to SEQ ID NO: 350

SEQ ID NO: 1060 - protein, 34 aa, Porcine reproductive and respiratory syndrome virus; identical to SEQ ID NO: 680

SEQ ID NO: 1061 - protein, 34 aa, Porcine reproductive and respiratory syndrome virus
LVNASGNSSSHLQLIYNLTICELNGTDWLNNKFD

SEQ ID NO: 1062 - protein, 34 aa, Porcine reproductive and respiratory syndrome virus
LVNAESNSSSHFQLIYNLTICELNGTDWLNNHFS

SEQ ID NO: 1063 - protein, 34 aa, Porcine reproductive and respiratory syndrome virus
LVNANSNSSSHFQLIYNLTLCELNGTDWLNNKFD

SEQ ID NO: 1064 - protein, 34 aa, Porcine reproductive and respiratory syndrome virus
  misc_feature (7)..(7): Xaa can be any naturally occurring amino acid
LVNANSXSSSHLQLIYNLTICELNGTDWLNNHFS

SEQ ID NO: 1065 - protein, 34 aa, Porcine reproductive and respiratory syndrome virus; identical to SEQ ID NO: 542

SEQ ID NO: 1066 - protein, 34 aa, Porcine reproductive and respiratory syndrome virus
  misc_feature (30)..(30): Xaa can be any naturally occurring amino acid
LVNADSNSSSHLQLIYNLTICELNGTBWLXNHFS

SEQ ID NO: 1067 - protein, 34 aa, Porcine reproductive and respiratory syndrome virus; identical to SEQ ID NO: 874

SEQ ID NO: 1068 - protein, 34 aa, Porcine reproductive and respiratory syndrome virus; identical to SEQ ID NO: 75

SEQ ID NO: 1069 - protein, 34 aa, Porcine reproductive and respiratory syndrome virus
LVNANNNSSSHLQLIYNLTICELNGTDWLNNTFD

SEQ ID NO: 1070 - protein, 34 aa, Porcine reproductive and respiratory syndrome virus; identical to SEQ ID NO: 962

SEQ ID NO: 1071 - protein, 34 aa, Porcine reproductive and respiratory syndrome virus
LVNANSDSSSHLQLIYNLTICELNGTDWLNEHFS

SEQ ID NO: 1072 - protein, 34 aa, Porcine reproductive and respiratory syndrome virus; identical to SEQ ID NO: 487

SEQ ID NO: 1073 - protein, 34 aa, Porcine reproductive and respiratory syndrome virus
LVNANSSNSSHLQLIYNLTICELNGTDWLNNHFS

SEQ ID NO: 1074 - protein, 34 aa, Porcine reproductive and respiratory syndrome virus; identical to SEQ ID NO: 267

SEQ ID NO: 1075 - protein, 34 aa, Porcine reproductive and respiratory syndrome virus; identical to SEQ ID NO: 680

SEQ ID NO: 1076 - protein, 34 aa, Porcine reproductive and respiratory syndrome virus
LVNAGSNSSSHLQLIYNLTICELNGTGWLNDHFS

SEQ ID NO: 1077 - protein, 34 aa, Porcine reproductive and respiratory syndrome virus
LVSANNSSSSHLQLIYNMTLCELNGTDWLASRFD

SEQ ID NO: 1078 - protein, 34 aa, Porcine reproductive and respiratory syndrome virus
LVNASNNSSSHLQLIYNLTICELNGTGWLNEHFS

SEQ ID NO: 1079 - protein, 34 aa, Porcine reproductive and respiratory syndrome virus; identical to SEQ ID NO: 188

SEQ ID NO: 1080 - protein, 34 aa, Porcine reproductive and respiratory syndrome virus
LVNANSSSSSHFQLIYNLTLCELNGTDWLAQKFD

SEQ ID NO: 1081 - protein, 34 aa, Porcine reproductive and respiratory syndrome virus; identical to SEQ ID NO: 475

SEQ ID NO: 1082 - protein, 34 aa, Porcine reproductive and respiratory syndrome virus; identical to SEQ ID NO: 267

SEQ ID NO: 1083 - protein, 34 aa, Porcine reproductive and respiratory syndrome virus
LVNADNNSSSHLQLIYNLTICELNGTDWLNEKFD

SEQ ID NO: 1084 - protein, 34 aa, Porcine reproductive and respiratory syndrome virus
LANASDNSSSHLQLIYNLTLCELNGTDWLAGKFD

SEQ ID NO: 1085 - protein, 34 aa, Porcine reproductive and respiratory syndrome virus; identical to SEQ ID NO: 1039

SEQ ID NO: 1086 - protein, 34 aa, Porcine reproductive and respiratory syndrome virus; identical to SEQ ID NO: 481

SEQ ID NO: 1087 - protein, 34 aa, Porcine reproductive and respiratory syndrome virus
LVNANSSSSSHLQLIYNLTLCELNGTDWLQDKFD

SEQ ID NO: 1088 - protein, 34 aa, Porcine reproductive and respiratory syndrome virus
LVNANSDSSSHLQLIYNLTICELNGTDWLGNKFD

SEQ ID NO: 1089 - protein, 34 aa, Porcine reproductive and respiratory syndrome virus
LVNANSNSSSHIQLIYNLTLCELNGTDWLANEFD

SEQ ID NO: 1090 - protein, 34 aa, Porcine reproductive and respiratory syndrome virus
LVNASNDSSSHLQLIYNLTICELNGTDWLNEHFS

SEQ ID NO: 1091 - protein, 34 aa, Porcine reproductive and respiratory syndrome virus; identical to SEQ ID NO: 350

SEQ ID NO: 1092 - protein, 34 aa, Porcine reproductive and respiratory syndrome virus
LVNANQNSSSHLQLIYNLTICELNGTDWLRDKFN

SEQ ID NO: 1093 - protein, 34 aa, Porcine reproductive and respiratory syndrome virus
LVNANSSSSSHLQLIYNLTLCELNGTDWLGDKFD

SEQ ID NO: 1094 - protein, 34 aa, Porcine reproductive and respiratory syndrome virus
LVNANSSSSSHLQLIYNLTICELNGTDWLDGHFS

SEQ ID NO: 1095 - protein, 34 aa, Porcine reproductive and respiratory syndrome virus; identical to SEQ ID NO: 519

SEQ ID NO: 1096 - protein, 34 aa, Porcine reproductive and respiratory syndrome virus
LVNASNNNSSHLQLIYNLTICELNGTEWLNDHFS

SEQ ID NO: 1097 - protein, 34 aa, Porcine reproductive and respiratory syndrome virus
LVNANSNSSSHFQLIYNLTLCELNGTEWLGSKFD

SEQ ID NO: 1098 - protein, 34 aa, Porcine reproductive and respiratory syndrome virus
LVNASSDNSSHLQLIYNLTICELNGTDWLDKHFS

SEQ ID NO: 1099 - protein, 34 aa, Porcine reproductive and respiratory syndrome virus
LVNANSNSSSHLQSIYNLTICELNGTDWLNNRFS

SEQ ID NO: 1100 - protein, 34 aa, Porcine reproductive and respiratory syndrome virus
LVNASSNSSSHLQLIYNLTICELNGTDWLDNHFS

SEQ ID NO: 1101 - protein, 34 aa, Porcine reproductive and respiratory syndrome virus
LVNANSNSSSHLQLIYNLTLCELNGTDWLRDKFG

SEQ ID NO: 1102 - protein, 34 aa, Porcine reproductive and respiratory syndrome virus; identical to SEQ ID NO: 680

SEQ ID NO: 1103 - protein, 34 aa, Porcine reproductive and respiratory syndrome virus; identical to SEQ ID NO: 819

SEQ ID NO: 1104 - protein, 34 aa, Porcine reproductive and respiratory syndrome virus
LVNANSNSSSHLQLIYNLTICELNGTDWLDGHFS

SEQ ID NO: 1105 - protein, 34 aa, Porcine reproductive and respiratory syndrome virus; identical to SEQ ID NO: 878

SEQ ID NO: 1106 - protein, 34 aa, Porcine reproductive and respiratory syndrome virus; identical to SEQ ID NO: 350

SEQ ID NO: 1107 - protein, 34 aa, Porcine reproductive and respiratory syndrome virus
LVNAKGNSSSHLQLIYNLTLCELNGTDWLKDKFD

SEQ ID NO: 1108 - protein, 34 aa, Porcine reproductive and respiratory syndrome virus; identical to SEQ ID NO: 680

SEQ ID NO: 1109 - protein, 34 aa, Porcine reproductive and respiratory syndrome virus
LVNANSSHSSHFQLIYNLTLCELNGTDWLANKFD

SEQ ID NO: 1110 - protein, 34 aa, Porcine reproductive and respiratory syndrome virus
IVNANSTSSSHLQLIYNLTLCELNGTDWLADKFD

SEQ ID NO: 1111 - protein, 34 aa, Porcine reproductive and respiratory syndrome virus; identical to SEQ ID NO: 878

SEQ ID NO: 1112 - protein, 34 aa, Porcine reproductive and respiratory syndrome virus; identical to SEQ ID NO: 737

SEQ ID NO: 1113 - protein, 34 aa, Porcine reproductive and respiratory syndrome virus; identical to SEQ ID NO: 461

SEQ ID NO: 1114 - protein, 34 aa, Porcine reproductive and respiratory syndrome virus; identical to SEQ ID NO: 513

SEQ ID NO: 1115 - protein, 34 aa, Porcine reproductive and respiratory syndrome virus
LVNASNNSSSHLQLIYNLTLCELNGTDWLANNFD

SEQ ID NO: 1116 - protein, 34 aa, Porcine reproductive and respiratory syndrome virus; identical to SEQ ID NO: 690

SEQ ID NO: 1117 - protein, 34 aa, Porcine reproductive and respiratory syndrome virus; identical to SEQ ID NO: 987

SEQ ID NO: 1118 - protein, 34 aa, Porcine reproductive and respiratory syndrome virus
LVNASNNNSSHLQLIYNLTICELNGTDWLNKHFS

SEQ ID NO: 1119 - protein, 34 aa, Porcine reproductive and respiratory syndrome virus
LVNASNNSSSHLQLIYNLTICELNGTDWLNERFN

SEQ ID NO: 1120 - protein, 34 aa, Porcine reproductive and respiratory syndrome virus; identical to SEQ ID NO: 563

SEQ ID NO: 1121 - protein, 34 aa, Porcine reproductive and respiratory syndrome virus
LVNASGNSSSHLQLIYNLTICELNGTDWLNDHFS

SEQ ID NO: 1122 - protein, 34 aa, Porcine reproductive and respiratory syndrome virus; identical to SEQ ID NO: 655

SEQ ID NO: 1123 - protein, 34 aa, Porcine reproductive and respiratory syndrome virus; identical to SEQ ID NO: 267

SEQ ID NO: 1124 - protein, 34 aa, Porcine reproductive and respiratory syndrome virus
LVNASDNNSSHLQLIYNLTICELNGTDWLNKHFS

SEQ ID NO: 1125 - protein, 34 aa, Porcine reproductive and respiratory syndrome virus; identical to SEQ ID NO: 686

SEQ ID NO: 1126 - protein, 34 aa, Porcine reproductive and respiratory syndrome virus; identical to SEQ ID NO: 55

SEQ ID NO: 1127 - protein, 34 aa, Porcine reproductive and respiratory syndrome virus
LVNANSNSSSHFQLIYNLTLCELNGTDWLRDKFD

SEQ ID NO: 1128 - protein, 34 aa, Porcine reproductive and respiratory syndrome virus
LVNANSNSSSHLQLIYNLTICELNGTDWLDSHFS

SEQ ID NO: 1129 - protein, 34 aa, Porcine reproductive and respiratory syndrome virus; identical to SEQ ID NO: 720

SEQ ID NO: 1130 - protein, 34 aa, Porcine reproductive and respiratory syndrome virus
LANAHSNSSSHLQLIYNLTICELNGTDWLNRHFS

SEQ ID NO: 1131 - protein, 34 aa, Porcine reproductive and respiratory syndrome virus
LANAQSNSSSHLQLIYNLTICELNGTDWLNRHFS

SEQ ID NO: 1132 - protein, 34 aa, Porcine reproductive and respiratory syndrome virus; identical to SEQ ID NO: 250

SEQ ID NO: 1133 - protein, 34 aa, Porcine reproductive and respiratory syndrome virus; identical to SEQ ID NO: 236

SEQ ID NO: 1134 - protein, 34 aa, Porcine reproductive and respiratory syndrome virus
  misc_feature (3)..(3): Xaa can be any naturally occurring amino acid
LVXANSNSSSHLQLIYNLTICELNGTDWLNDKFN

SEQ ID NO: 1135 - protein, 34 aa, Porcine reproductive and respiratory syndrome virus
LVNANRNSSSHLQLIYNLTLCELNGTDWLKDKFD

SEQ ID NO: 1136 - protein, 34 aa, Porcine reproductive and respiratory syndrome virus; identical to SEQ ID NO: 75

SEQ ID NO: 1137 - protein, 34 aa, Porcine reproductive and respiratory syndrome virus; identical to SEQ ID NO: 481

SEQ ID NO: 1138 - protein, 34 aa, Porcine reproductive and respiratory syndrome virus
LANASSNNSSHLQLIYNLTLCELNGTDWLANKFD

SEQ ID NO: 1139 - protein, 34 aa, Porcine reproductive and respiratory syndrome virus; identical to SEQ ID NO: 267

SEQ ID NO: 1140 - protein, 34 aa, Porcine reproductive and respiratory syndrome virus
SFADGNGNNSTYQYIYNLTICELNGTKWLSGHFE

SEQ ID NO: 1141 - protein, 34 aa, Porcine reproductive and respiratory syndrome virus
LANANSNSSSHLQLIYNLTLCELNGTDWLANKFD

SEQ ID NO: 1142 - protein, 34 aa, Porcine reproductive and respiratory syndrome virus
LANASNHSSSHLQLIYNLTLCELNGTDWLANKFD

SEQ ID NO: 1143 - protein, 34 aa, Porcine reproductive and respiratory syndrome virus; identical to SEQ ID NO: 47

SEQ ID NO: 1144 - protein, 34 aa, Porcine reproductive and respiratory syndrome virus
PANASNDSSSHLQLIYNLTLCELNGTDWLANKFD

SEQ ID NO: 1145 - protein, 34 aa, Porcine reproductive and respiratory syndrome virus; identical to SEQ ID NO: 486

SEQ ID NO: 1146 - protein, 33 aa, Porcine reproductive and respiratory syndrome virus
VNANSNSSSHLQLIYNLTICELNGTEWLGRKFD

SEQ ID NO: 1147 - protein, 34 aa, Porcine reproductive and respiratory syndrome virus
LVNASSNSSSHLQLIYNLTICELNGTDWLNKHFG

SEQ ID NO: 1148 - protein, 34 aa, Porcine reproductive and respiratory syndrome virus
LVNANSNSSSHLQLIYNLTICELNGTDWLDNHFS

SEQ ID NO: 1149 - protein, 34 aa, Porcine reproductive and respiratory syndrome virus
LANASSNNSSHLQLIYNLTICELNGTDWLNNHFS

SEQ ID NO: 1150 - protein, 34 aa, Porcine reproductive and respiratory syndrome virus
LVNAENNSSSHLQLIYNLTICELNGTDWLNKKFD

SEQ ID NO: 1151 - protein, 34 aa, Porcine reproductive and respiratory syndrome virus
LVNAHSNSSSHLQLIYNLTICELNGTEWLNNRFS

SEQ ID NO: 1152 - protein, 34 aa, Porcine reproductive and respiratory syndrome virus
LVNANSNSSSHFQLIYNLTLCELNGTDWLAQRFD

SEQ ID NO: 1153 - protein, 34 aa, Porcine reproductive and respiratory syndrome virus
LVNASNNHSSHFQLIYNLTLCELNGTDWLANKFD

SEQ ID NO: 1154 - protein, 34 aa, Porcine reproductive and respiratory syndrome virus; identical to SEQ ID NO: 765

SEQ ID NO: 1155 - protein, 34 aa, Porcine reproductive and respiratory syndrome virus; identical to SEQ ID NO: 765

SEQ ID NO: 1156 - protein, 34 aa, Porcine reproductive and respiratory syndrome virus
LVNASNNGSSHLQLIYNLTICELNGTDWLNDKFD

SEQ ID NO: 1157 - protein, 34 aa, Porcine reproductive and respiratory syndrome virus; identical to SEQ ID NO: 350

SEQ ID NO: 1158 - protein, 34 aa, Porcine reproductive and respiratory syndrome virus; identical to SEQ ID NO: 47

SEQ ID NO: 1159 - protein, 34 aa, Porcine reproductive and respiratory syndrome virus; identical to SEQ ID NO: 267

SEQ ID NO: 1160 - protein, 34 aa, Porcine reproductive and respiratory syndrome virus
LVNANNDSSSHLQLIYNLTICELNGTEWLNEHFS

SEQ ID NO: 1161 - protein, 34 aa, Porcine reproductive and respiratory syndrome virus; identical to SEQ ID NO: 475

SEQ ID NO: 1162 - protein, 34 aa, Porcine reproductive and respiratory syndrome virus
LVNADNNSSSHLQLIYNLTICELNGTDWLTTNFD

SEQ ID NO: 1163 - protein, 34 aa, Porcine reproductive and respiratory syndrome virus; identical to SEQ ID NO: 55

SEQ ID NO: 1164 - protein, 34 aa, Porcine reproductive and respiratory syndrome virus
LVNANSNSSSHLQLIYNLTICELNGTEWLSNHFS

SEQ ID NO: 1165 - protein, 34 aa, Porcine reproductive and respiratory syndrome virus
LVNANSNSSSHFQLIYNLTLCELNGTHWLANKFD

SEQ ID NO: 1166 - protein, 34 aa, Porcine reproductive and respiratory syndrome virus; identical to SEQ ID NO: 680

SEQ ID NO: 1167 - protein, 34 aa, Porcine reproductive and respiratory syndrome virus; identical to SEQ ID NO: 55

SEQ ID NO: 1168 - protein, 34 aa, Porcine reproductive and respiratory syndrome virus; identical to SEQ ID NO: 47

SEQ ID NO: 1169 - protein, 34 aa, Porcine reproductive and respiratory syndrome virus
  misc_feature (6)..(6): Xaa can be any naturally occurring amino acid
LANASXNSSSHLQLIYNLTLCELNGTDWLABKFD

SEQ ID NO: 1170 - protein, 34 aa, Porcine reproductive and respiratory syndrome virus; identical to SEQ ID NO: 61

SEQ ID NO: 1171 - protein, 34 aa, Porcine reproductive and respiratory syndrome virus
LVNAHSNSSSHLQLIYNLTICELNGTEWLDEHFS

SEQ ID NO: 1172 - protein, 34 aa, Porcine reproductive and respiratory syndrome virus; identical to SEQ ID NO: 44

SEQ ID NO: 1173 - protein, 34 aa, Porcine reproductive and respiratory syndrome virus; identical to SEQ ID NO: 481

SEQ ID NO: 1174 - protein, 34 aa, Porcine reproductive and respiratory syndrome virus; identical to SEQ ID NO: 473

SEQ ID NO: 1175 - protein, 34 aa, Porcine reproductive and respiratory syndrome virus
LVNASGNSSSHVQLIYNLTICELNGTDWLNNKFD

SEQ ID NO: 1176 - protein, 34 aa, Porcine reproductive and respiratory syndrome virus
LVNAEENHSSHLQLIYNLTLCELNGTDWLKNKFD

SEQ ID NO: 1177 - protein, 34 aa, Porcine reproductive and respiratory syndrome virus
LVNAGNNNSSHLQLIYNLTICELNGTDWLNKHFG

SEQ ID NO: 1178 - protein, 34 aa, Porcine reproductive and respiratory syndrome virus; identical to SEQ ID NO: 680

SEQ ID NO: 1179 - protein, 34 aa, Porcine reproductive and respiratory syndrome virus; identical to SEQ ID NO: 483

SEQ ID NO: 1180 - protein, 34 aa, Porcine reproductive and respiratory syndrome virus; identical to SEQ ID NO: 481

SEQ ID NO: 1181 - protein, 34 aa, Porcine reproductive and respiratory syndrome virus; identical to SEQ ID NO: 874

SEQ ID NO: 1182 - protein, 34 aa, Porcine reproductive and respiratory syndrome virus
LGNADSNSSSHLQLIYNLTICELNGTDWLNNHFS

SEQ ID NO: 1183 - protein, 34 aa, Porcine reproductive and respiratory syndrome virus
LVNAGNSSSSHLQLIYNLTLCELNGTDWLGNKFD

SEQ ID NO: 1184 - protein, 34 aa, Porcine reproductive and respiratory syndrome virus
LVNASNSSSSHLQLIYNLTICELNGTDWLNKSFD

SEQ ID NO: 1185 - protein, 34 aa, Porcine reproductive and respiratory syndrome virus; identical to SEQ ID NO: 475

SEQ ID NO: 1186 - protein, 34 aa, Porcine reproductive and respiratory syndrome virus; identical to SEQ ID NO: 962

SEQ ID NO: 1187 - protein, 34 aa, Porcine reproductive and respiratory syndrome virus; identical to SEQ ID NO: 48

SEQ ID NO: 1188 - protein, 34 aa, Porcine reproductive and respiratory syndrome virus
LVNANSNSSSHLQLIYNLTICELNGTDWLKNKFD

SEQ ID NO: 1189 - protein, 34 aa, Porcine reproductive and respiratory syndrome virus
LANASGNSSSHLQLIYNLTLCELNGTDWLRNKFD

SEQ ID NO: 1190 - protein, 34 aa, Porcine reproductive and respiratory syndrome virus
LVNADSNSSSHLQLIYNLTICELNGTDWLNEHFS

SEQ ID NO: 1191 - protein, 34 aa, Porcine reproductive and respiratory syndrome virus; identical to SEQ ID NO: 680

SEQ ID NO: 1192 - protein, 34 aa, Porcine reproductive and respiratory syndrome virus; identical to SEQ ID NO: 1151

SEQ ID NO: 1193 - protein, 34 aa, Porcine reproductive and respiratory syndrome virus
LVNASNNSSSHLQLIYNLTICELNGTEWLNDHFS

SEQ ID NO: 1194 - protein, 34 aa, Porcine reproductive and respiratory syndrome virus
IVNASNNSSSHLQLIYNLTICELNGTEWLNNHFS

SEQ ID NO: 1195 - protein, 34 aa, Porcine reproductive and respiratory syndrome virus; identical to SEQ ID NO: 1100

SEQ ID NO: 1196 - protein, 34 aa, Porcine reproductive and respiratory syndrome virus; identical to SEQ ID NO: 680

SEQ ID NO: 1197 - protein, 34 aa, Porcine reproductive and respiratory syndrome virus; identical to SEQ ID NO: 39

SEQ ID NO: 1198 - protein, 34 aa, Porcine reproductive and respiratory syndrome virus; identical to SEQ ID NO: 172

SEQ ID NO: 1199 - protein, 34 aa, Porcine reproductive and respiratory syndrome virus; identical to SEQ ID NO: 481

SEQ ID NO: 1200 - protein, 34 aa, Porcine reproductive and respiratory syndrome virus
IVNASSNSSSHFQLIYNLTLCELNGTDWLANHFD

SEQ ID NO: 1201 - protein, 34 aa, Porcine reproductive and respiratory syndrome virus; identical to SEQ ID NO: 686

SEQ ID NO: 1202 - protein, 34 aa, Porcine reproductive and respiratory syndrome virus
PVNADNSSSSYSQLIYNLTICELNGTDWLADKFN

SEQ ID NO: 1203 - protein, 34 aa, Porcine reproductive and respiratory syndrome virus; identical to SEQ ID NO: 680

SEQ ID NO: 1204 - protein, 34 aa, Porcine reproductive and respiratory syndrome virus; identical to SEQ ID NO: 1036

SEQ ID NO: 1205 - protein, 34 aa, Porcine reproductive and respiratory syndrome virus
LVNADGNSSSHFQLIYNLTICELNGTDWLNNHFS

SEQ ID NO: 1206 - protein, 34 aa, Porcine reproductive and respiratory syndrome virus; identical to SEQ ID NO: 55

SEQ ID NO: 1207 - protein, 34 aa, Porcine reproductive and respiratory syndrome virus
LVNANSNSSSHLQLIYNLTLCELNGTEWLAGRFD

SEQ ID NO: 1208 - protein, 34 aa, Porcine reproductive and respiratory syndrome virus; identical to SEQ ID NO: 918

SEQ ID NO: 1209 - protein, 34 aa, Porcine reproductive and respiratory syndrome virus
LVNANGNSSSHLQLIYNLTICELNGTDWLNSHFS

SEQ ID NO: 1210 - protein, 34 aa, Porcine reproductive and respiratory syndrome virus
LVNASSNSSSHFQLIYNLTICELNGTDWLNDHFS

SEQ ID NO: 1211 - protein, 34 aa, Porcine reproductive and respiratory syndrome virus
LVNASNNSSSHLQLIYNLTICELNGTDWLNDRFD

SEQ ID NO: 1212 - protein, 34 aa, Porcine reproductive and respiratory syndrome virus; identical to SEQ ID NO: 267

SEQ ID NO: 1213 - protein, 34 aa, Porcine reproductive and respiratory syndrome virus; identical to SEQ ID NO: 513

SEQ ID NO: 1214 - protein, 34 aa, Porcine reproductive and respiratory syndrome virus; identical to SEQ ID NO: 1029

SEQ ID NO: 1215 - protein, 34 aa, Porcine reproductive and respiratory syndrome virus
IVNANSSSSSHFQLIYNLTLCELNGTDWLASKFD

SEQ ID NO: 1216 - protein, 34 aa, Porcine reproductive and respiratory syndrome virus
LVNAKSNSSSHLQLIYNLTLCELNGTBWLKDKFD

SEQ ID NO: 1217 - protein, 34 aa, Porcine reproductive and respiratory syndrome virus; identical to SEQ ID NO: 75

SEQ ID NO: 1218 - protein, 34 aa, Porcine reproductive and respiratory syndrome virus
LVNASNNSSSHLQLIYNLTICELNGTDWLNGHFS

SEQ ID NO: 1219 - protein, 34 aa, Porcine reproductive and respiratory syndrome virus
  misc_feature (31)..(31): Xaa can be any naturally occurring amino acid
LVNASNNNSSHLQLIYNLTICELNGTDWLNXHFS

SEQ ID NO: 1220 - protein, 34 aa, Porcine reproductive and respiratory syndrome virus; identical to SEQ ID NO: 481

SEQ ID NO: 1221 - protein, 34 aa, Porcine reproductive and respiratory syndrome virus
LVNASNDSSSHLQLIYNLTICELNGTDWLNDKFD

SEQ ID NO: 1222 - protein, 34 aa, Porcine reproductive and respiratory syndrome virus
LVNASSNSSSHLQLIYNLTICELNGTDWLNTHFS

SEQ ID NO: 1223 - protein, 34 aa, Porcine reproductive and respiratory syndrome virus; identical to SEQ ID NO: 350

SEQ ID NO: 1224 - protein, 34 aa, Porcine reproductive and respiratory syndrome virus; identical to SEQ ID NO: 486

SEQ ID NO: 1225 - protein, 34 aa, Porcine reproductive and respiratory syndrome virus; identical to SEQ ID NO: 483

SEQ ID NO: 1226 - protein, 34 aa, Porcine reproductive and respiratory syndrome virus
LVNAKNNSSSHLQLIYNLTICELNGTDWLNKKFD

SEQ ID NO: 1227 - protein, 34 aa, Porcine reproductive and respiratory syndrome virus
LVNANGNSSSHLQLIYNLTICELNGTDWLNNHFS

SEQ ID NO: 1228 - protein, 34 aa, Porcine reproductive and respiratory syndrome virus
LVNANSNSSSHLQLIYNLTICELNGTDWLKNNFD

SEQ ID NO: 1229 - protein, 34 aa, Porcine reproductive and respiratory syndrome virus
LVNASSNSSSHLQLIYNLTICELNGTDWLNNHFN

SEQ ID NO: 1230 - protein, 34 aa, Porcine reproductive and respiratory syndrome virus; identical to SEQ ID NO: 499

SEQ ID NO: 1231 - protein, 34 aa, Porcine reproductive and respiratory syndrome virus
LVNANSNSSSHLQLIYNLTICELNGTDWLDRHFS

SEQ ID NO: 1232 - protein, 34 aa, Porcine reproductive and respiratory syndrome virus; identical to SEQ ID NO: 469

SEQ ID NO: 1233 - protein, 34 aa, Porcine reproductive and respiratory syndrome virus
IVNASSNSSSQFQLIYNLTICELNGTEWLANKFD

SEQ ID NO: 1234 - protein, 34 aa, Porcine reproductive and respiratory syndrome virus; identical to SEQ ID NO: 1207

SEQ ID NO: 1235 - protein, 34 aa, Porcine reproductive and respiratory syndrome virus; identical to SEQ ID NO: 560

SEQ ID NO: 1236 - protein, 34 aa, Porcine reproductive and respiratory syndrome virus
LVNASSNSSSHLQLIYNLTICELNGTDWLNGHFS

SEQ ID NO: 1237 - protein, 34 aa, Porcine reproductive and respiratory syndrome virus; identical to SEQ ID NO: 1040

SEQ ID NO: 1238 - protein, 34 aa, Porcine reproductive and respiratory syndrome virus; identical to SEQ ID NO: 996

SEQ ID NO: 1239 - protein, 34 aa, Porcine reproductive and respiratory syndrome virus; identical to SEQ ID NO: 39

SEQ ID NO: 1240 - protein, 34 aa, Porcine reproductive and respiratory syndrome virus; identical to SEQ ID NO: 1052

SEQ ID NO: 1241 - protein, 34 aa, Porcine reproductive and respiratory syndrome virus
IVNASSNSSSHFQLIYNLTLCELNGTDWLAEKFD

SEQ ID NO: 1242 - protein, 34 aa, Porcine reproductive and respiratory syndrome virus
LVNAHSNSSSHFQLIYNLTLCELNGTEWLGNKFD

SEQ ID NO: 1243 - protein, 34 aa, Porcine reproductive and respiratory syndrome virus
LVNASNNDSSHLQSIYNLTICELNGTDWLSNKFD

SEQ ID NO: 1244 - protein, 34 aa, Porcine reproductive and respiratory syndrome virus
LVNASNNSSSHFQLIYNLTICELNGTDWLNEHFS

SEQ ID NO: 1245 - protein, 34 aa, Porcine reproductive and respiratory syndrome virus; identical to SEQ ID NO: 696

SEQ ID NO: 1246 - protein, 34 aa, Porcine reproductive and respiratory syndrome virus
LVNADSNSSSHLQLIYNLTICELNGTDWLNSHFS

SEQ ID NO: 1247 - protein, 34 aa, Porcine reproductive and respiratory syndrome virus; identical to SEQ ID NO: 41

SEQ ID NO: 1248 - protein, 34 aa, Porcine reproductive and respiratory syndrome virus
LVNASNNSSSHLQLIYNLTICELNGTDWLBKHFS

SEQ ID NO: 1249 - protein, 34 aa, Porcine reproductive and respiratory syndrome virus
LVNANNNSSSHLQLIYNLTICELNGTDWLNSHFS

SEQ ID NO: 1250 - protein, 34 aa, Porcine reproductive and respiratory syndrome virus
LVNASNNSSSHLQSIYNLTICELNGTDWLNGHFS

SEQ ID NO: 1251 - protein, 34 aa, Porcine reproductive and respiratory syndrome virus
LVNANNSSSSHIQLIYNLTLCELNGTDWLANKFD

SEQ ID NO: 1252 - protein, 34 aa, Porcine reproductive and respiratory syndrome virus; identical to SEQ ID NO: 1121

SEQ ID NO: 1253 - protein, 34 aa, Porcine reproductive and respiratory syndrome virus
LVNASNNSSSHLQLIYNLTLCELNGTDWLANRFD

SEQ ID NO: 1254 - protein, 34 aa, Porcine reproductive and respiratory syndrome virus
LVNANSNSSSHFQLIYNLTLCELNGTDWLKGKFD

SEQ ID NO: 1255 - protein, 34 aa, Porcine reproductive and respiratory syndrome virus; identical to SEQ ID NO: 987

SEQ ID NO: 1256 - protein, 34 aa, Porcine reproductive and respiratory syndrome virus
LVNANRNNSSHLQLIYNLTLCELNGTDWLKNKFD

SEQ ID NO: 1257 - protein, 34 aa, Porcine reproductive and respiratory syndrome virus
LVNANSSSSSHLQLIYNLTLCELNGTDWLNNKFD

SEQ ID NO: 1258 - protein, 34 aa, Porcine reproductive and respiratory syndrome virus
LVNANSNSSSHFQLIYNLTICELNGTEWLSNHFS

SEQ ID NO: 1259 - protein, 34 aa, Porcine reproductive and respiratory syndrome virus; identical to SEQ ID NO: 493

SEQ ID NO: 1260 - protein, 34 aa, Porcine reproductive and respiratory syndrome virus
LVNASSNSSSHLQLIYNLTICELNGTDWLDNRFS

SEQ ID NO: 1261 - protein, 34 aa, Porcine reproductive and respiratory syndrome virus
  misc_feature (31)..(31): Xaa can be any naturally occurring amino acid
LVNASNNSSSHLQLIYNLTICELNGTDWLNXHFS

SEQ ID NO: 1262 - protein, 34 aa, Porcine reproductive and respiratory syndrome virus; identical to SEQ ID NO: 680

SEQ ID NO: 1263 - protein, 34 aa, Porcine reproductive and respiratory syndrome virus; identical to SEQ ID NO: 918

SEQ ID NO: 1264 - protein, 34 aa, Porcine reproductive and respiratory syndrome virus
IVNASSNSSSHLQLIYNLTICELNGTDWLNNHFS

SEQ ID NO: 1265 - protein, 34 aa, Porcine reproductive and respiratory syndrome virus
LVNANSNSSSHLQSIYNLTICELNGTDWLNDHFS

SEQ ID NO: 1266 - protein, 34 aa, Porcine reproductive and respiratory syndrome virus
LVNASSNSSSHLQLIYNLTICELNGTDWLKDHFS

SEQ ID NO: 1267 - protein, 34 aa, Porcine reproductive and respiratory syndrome virus; identical to SEQ ID NO: 918

SEQ ID NO: 1268 - protein, 34 aa, Porcine reproductive and respiratory syndrome virus
LVNANSSSGSHLQLIYNLTLCELNGTDWLGNKFD

SEQ ID NO: 1269 - protein, 34 aa, Porcine reproductive and respiratory syndrome virus
LVNANSSNSSHLQLIYNLTICELNGTDWLDNHFS

SEQ ID NO: 1270 - protein, 34 aa, Porcine reproductive and respiratory syndrome virus
LVNASNNNSSHLQLIYNLTICELNGTDWLDGHFS

SEQ ID NO: 1271 - protein, 34 aa, Porcine reproductive and respiratory syndrome virus
LVNASSNSSSHLQLIYNLTICELNGTDWLNSHFS

SEQ ID NO: 1272 - protein, 34 aa, Porcine reproductive and respiratory syndrome virus; identical to SEQ ID NO: 680

SEQ ID NO: 1273 - protein, 34 aa, Porcine reproductive and respiratory syndrome virus
LVNASNSSSSHLQLIYNLTICELNGTDWLDSHFS

SEQ ID NO: 1274 - protein, 34 aa, Porcine reproductive and respiratory syndrome virus
LVNANSNSSSHFQLIYNLTLCELNGTEWLSNRFD

SEQ ID NO: 1275 - protein, 34 aa, Porcine reproductive and respiratory syndrome virus; identical to SEQ ID NO: 188

SEQ ID NO: 1276 - protein, 34 aa, Porcine reproductive and respiratory syndrome virus; identical to SEQ ID NO: 680

SEQ ID NO: 1277 - protein, 34 aa, Porcine reproductive and respiratory syndrome virus
LVNADSNNSSHLQSIYNLTICELNGTDWLNNKFD

SEQ ID NO: 1278 - protein, 34 aa, Porcine reproductive and respiratory syndrome virus; identical to SEQ ID NO: 878

SEQ ID NO: 1279 - protein, 34 aa, Porcine reproductive and respiratory syndrome virus; identical to SEQ ID NO: 1265

SEQ ID NO: 1280 - protein, 34 aa, Porcine reproductive and respiratory syndrome virus
LVNASSNNSSHLQLIYNLTICELNGTDWLDNHFS

SEQ ID NO: 1281 - protein, 34 aa, Porcine reproductive and respiratory syndrome virus
LANASENSSSHLQLIYNLTLCELNGTDWLKNKFD

SEQ ID NO: 1282 - protein, 34 aa, Porcine reproductive and respiratory syndrome virus; identical to SEQ ID NO: 267

SEQ ID NO: 1283 - protein, 34 aa, Porcine reproductive and respiratory syndrome virus
LVNATSNSSSHLQLIYNLTLCELNGTDWLKDKFD

SEQ ID NO: 1284 - protein, 34 aa, Porcine reproductive and respiratory syndrome virus
LANAHSGNSSHLQLIYNLTICELNGTDWLNNHFS

SEQ ID NO: 1285 - protein, 34 aa, Porcine reproductive and respiratory syndrome virus; identical to SEQ ID NO: 475

SEQ ID NO: 1286 - protein, 34 aa, Porcine reproductive and respiratory syndrome virus; identical to SEQ ID NO: 1049

SEQ ID NO: 1287 - protein, 34 aa, Porcine reproductive and respiratory syndrome virus
IVNANSNSSSQFQLIYNLTICELNGTDWLANKFD

SEQ ID NO: 1288 - protein, 34 aa, Porcine reproductive and respiratory syndrome virus
LVNASSNNSSHLQLIYNLTICELNGTDWLDRHFG

SEQ ID NO: 1289 - protein, 34 aa, Porcine reproductive and respiratory syndrome virus; identical to SEQ ID NO: 720

SEQ ID NO: 1290 - protein, 34 aa, Porcine reproductive and respiratory syndrome virus; identical to SEQ ID NO: 267

SEQ ID NO: 1291 - protein, 34 aa, Porcine reproductive and respiratory syndrome virus
LVNASNSSSSHLQLIYNLTICELNGTDWLNNHFS

SEQ ID NO: 1292 - protein, 34 aa, Porcine reproductive and respiratory syndrome virus
LVNADSNSSSHLQLIYNLTICELNGTEWLNEHFS

SEQ ID NO: 1293 - protein, 34 aa, Porcine reproductive and respiratory syndrome virus
LVNANNDSSSHLQLIYNLTICELNGTDWLNKHFS

SEQ ID NO: 1294 - protein, 34 aa, Porcine reproductive and respiratory syndrome virus; identical to SEQ ID NO: 484

SEQ ID NO: 1295 - protein, 34 aa, Porcine reproductive and respiratory syndrome virus
LVNASSNSSSHLQLIYNLTICELNGTDWLNEHFS

SEQ ID NO: 1296 - protein, 34 aa, Porcine reproductive and respiratory syndrome virus
  misc_feature (14)..(14): Xaa can be any naturally occurring amino acid
LVNANSNSSSHLQXIYNLTICELNGTDWLNNHFS

SEQ ID NO: 1297 - protein, 34 aa, Porcine reproductive and respiratory syndrome virus
LVNAGNNNSSHLQLIYNLTICELNGTDWLNRHFS

SEQ ID NO: 1298 - protein, 34 aa, Porcine reproductive and respiratory syndrome virus
LVNASNGSSSNLQLIYNLTICELNGTDWLNDHFS

SEQ ID NO: 1299 - protein, 34 aa, Porcine reproductive and respiratory syndrome virus
LVNAGGNSSSHFQLIYNLTICELNGTDWLNDHFS

SEQ ID NO: 1300 - protein, 34 aa, Porcine reproductive and respiratory syndrome virus; identical to SEQ ID NO: 1299

SEQ ID NO: 1301 - protein, 34 aa, Porcine reproductive and respiratory syndrome virus
LVNANSNNSSHLQLIYNLTICELNGTDWLNEHFS

SEQ ID NO: 1302 - protein, 34 aa, Porcine reproductive and respiratory syndrome virus
LVNANNYSSSHLQLIYNLTICELNGTDWLNNHFS

SEQ ID NO: 1303 - protein, 34 aa, Porcine reproductive and respiratory syndrome virus; identical to SEQ ID NO: 1135

SEQ ID NO: 1304 - protein, 34 aa, Porcine reproductive and respiratory syndrome virus; identical to SEQ ID NO: 1026

SEQ ID NO: 1305 - protein, 34 aa, Porcine reproductive and respiratory syndrome virus
LVNASTNSSSHLQLIYNLTICELNGTEWLNNHFS

SEQ ID NO: 1306 - protein, 34 aa, Porcine reproductive and respiratory syndrome virus; identical to SEQ ID NO: 487

SEQ ID NO: 1307 - protein, 34 aa, Porcine reproductive and respiratory syndrome virus; identical to SEQ ID NO: 987

SEQ ID NO: 1308 - protein, 34 aa, Porcine reproductive and respiratory syndrome virus
LVNANSNSSSHLQLIYNLTICELNGTHWLYEHFS

SEQ ID NO: 1309 - protein, 34 aa, Porcine reproductive and respiratory syndrome virus
  misc_feature (27)..(27): Xaa can be any naturally occurring amino acid
LVNAGSNSSSHLQLIYNLTICELNGTXWLNNHFS

SEQ ID NO: 1310 - protein, 34 aa, Porcine reproductive and respiratory syndrome virus
LVNADSNNSSHLQLIYNLTICELNGTDWLDEHFS

SEQ ID NO: 1311 - protein, 34 aa, Porcine reproductive and respiratory syndrome virus
IVNASSNSSSHIQLIYNLTICELNGTDWLNHKFD

SEQ ID NO: 1312 - protein, 34 aa, Porcine reproductive and respiratory syndrome virus
LVNANSNSSSHLQLIYNLTICELNGTDWLYEHFS

SEQ ID NO: 1313 - protein, 34 aa, Porcine reproductive and respiratory syndrome virus
PANANNGSSSHLQLIYNLTLCELNGTDWLADKFD

SEQ ID NO: 1314 - protein, 34 aa, Porcine reproductive and respiratory syndrome virus; identical to SEQ ID NO: 178

SEQ ID NO: 1315 - protein, 34 aa, Porcine reproductive and respiratory syndrome virus
LVNADSNSSSHFQLIYNLTLCELNGTDWLAKNFD

SEQ ID NO: 1316 - protein, 34 aa, Porcine reproductive and respiratory syndrome virus
LANASDNSSSHLQLIYNLTLCELNGTDWLADKFD

SEQ ID NO: 1317 - protein, 34 aa, Porcine reproductive and respiratory syndrome virus; identical to SEQ ID NO: 1141

SEQ ID NO: 1318 - protein, 34 aa, Porcine reproductive and respiratory syndrome virus
FANASGNSSSHLQLIYNLTLCELNGTDWLANKFD

SEQ ID NO: 1319 - protein, 34 aa, Porcine reproductive and respiratory syndrome virus; identical to SEQ ID NO: 47

SEQ ID NO: 1320 - protein, 34 aa, Porcine reproductive and respiratory syndrome virus; identical to SEQ ID NO: 39

SEQ ID NO: 1321 - protein, 34 aa, Porcine reproductive and respiratory syndrome virus
  misc_feature (10)..(10): Xaa can be any naturally occurring amino acid
LVNANSNSSXHFQLIYNLTLCELNGTDWLANKFD

SEQ ID NO: 1322 - protein, 34 aa, Porcine reproductive and respiratory syndrome virus
LANASDNSSSHLQLIYNLTLCELNGTDWLANRFD

SEQ ID NO: 1323 - protein, 34 aa, Porcine reproductive and respiratory syndrome virus; identical to SEQ ID NO: 61

SEQ ID NO: 1324 - protein, 34 aa, Porcine reproductive and respiratory syndrome virus
LVNASSNSSSHLQLIYNLTLCELNGTDWLANKFD

SEQ ID NO: 1325 - protein, 34 aa, Porcine reproductive and respiratory syndrome virus; identical to SEQ ID NO: 256

SEQ ID NO: 1326 - protein, 34 aa, Porcine reproductive and respiratory syndrome virus; identical to SEQ ID NO: 47

SEQ ID NO: 1327 - protein, 34 aa, Porcine reproductive and respiratory syndrome virus; identical to SEQ ID NO: 564

SEQ ID NO: 1328 - protein, 34 aa, Porcine reproductive and respiratory syndrome virus
LVNANSNSSSHFQLIYNLTLCELNGTDWLANNFN

SEQ ID NO: 1329 - protein, 34 aa, Porcine reproductive and respiratory syndrome virus; identical to SEQ ID NO: 1056

SEQ ID NO: 1330 - protein, 34 aa, Porcine reproductive and respiratory syndrome virus
LVNATSNSSSHFQLIYNLTLCELNGTDWLAGKFN

SEQ ID NO: 1331 - protein, 34 aa, Porcine reproductive and respiratory syndrome virus; identical to SEQ ID NO: 236

SEQ ID NO: 1332 - protein, 34 aa, Porcine reproductive and respiratory syndrome virus; identical to SEQ ID NO: 564

SEQ ID NO: 1333 - protein, 34 aa, Porcine reproductive and respiratory syndrome virus; identical to SEQ ID NO: 1316

SEQ ID NO: 1334 - protein, 34 aa, Porcine reproductive and respiratory syndrome virus
LANADSNSSSHFQLIYNLTLCELNGTDWLNKKFD

SEQ ID NO: 1335 - protein, 34 aa, Porcine reproductive and respiratory syndrome virus
LVNANSTSSSHFQLIYNLTLCELNGTDWLADKFD

SEQ ID NO: 1336 - protein, 34 aa, Porcine reproductive and respiratory syndrome virus
LVNANSNSSSHLQLIYNLTLCELNGTDWLGKQFD

SEQ ID NO: 1337 - protein, 34 aa, Porcine reproductive and respiratory syndrome virus
LANASNNSSSHLQLIYNLTLCELNGTDWLANQFD

SEQ ID NO: 1338 - protein, 34 aa, Porcine reproductive and respiratory syndrome virus; identical to SEQ ID NO: 765

SEQ ID NO: 1339 - protein, 34 aa, Porcine reproductive and respiratory syndrome virus
LVNANSSSSSHFQLIYNLTICELNGTDWLDNKFD

SEQ ID NO: 1340 - protein, 34 aa, Porcine reproductive and respiratory syndrome virus; identical to SEQ ID NO: 39

SEQ ID NO: 1341 - protein, 34 aa, Porcine reproductive and respiratory syndrome virus; identical to SEQ ID NO: 55

SEQ ID NO: 1342 - protein, 34 aa, Porcine reproductive and respiratory syndrome virus; identical to SEQ ID NO: 178

SEQ ID NO: 1343 - protein, 34 aa, Porcine reproductive and respiratory syndrome virus; identical to SEQ ID NO: 542

SEQ ID NO: 1344 - protein, 34 aa, Porcine reproductive and respiratory syndrome virus; identical to SEQ ID NO: 542

SEQ ID NO: 1345 - protein, 34 aa, Porcine reproductive and respiratory syndrome virus
IVNAGSNSSSHFQLIYNLTLCELNGTDWLANKFD

SEQ ID NO: 1346 - protein, 34 aa, Porcine reproductive and respiratory syndrome virus; identical to SEQ ID NO: 55

SEQ ID NO: 1347 - protein, 34 aa, Porcine reproductive and respiratory syndrome virus
LVNASNDNSSHLQLIYNLTLCELNGTDWLANKFD

SEQ ID NO: 1348 - protein, 34 aa, Porcine reproductive and respiratory syndrome virus
LANASGNSSSHLQLIYNLTLCELNGTDWLANRFD

SEQ ID NO: 1349 - protein, 34 aa, Porcine reproductive and respiratory syndrome virus; identical to SEQ ID NO: 41

SEQ ID NO: 1350 - protein, 34 aa, Porcine reproductive and respiratory syndrome virus
PANANSNSSSHLQLIYNLTLCELNGTDWLANKFD

SEQ ID NO: 1351 - protein, 34 aa, Porcine reproductive and respiratory syndrome virus; identical to SEQ ID NO: 1350

SEQ ID NO: 1352 - protein, 34 aa, Porcine reproductive and respiratory syndrome virus; identical to SEQ ID NO: 39

SEQ ID NO: 1353 - protein, 34 aa, Porcine reproductive and respiratory syndrome virus; identical to SEQ ID NO: 595

SEQ ID NO: 1354 - protein, 34 aa, Porcine reproductive and respiratory syndrome virus; identical to SEQ ID NO: 55

SEQ ID NO: 1355 - protein, 34 aa, Porcine reproductive and respiratory syndrome virus; identical to SEQ ID NO: 183

SEQ ID NO: 1356 - protein, 34 aa, Porcine reproductive and respiratory syndrome virus
IVNASSNSSSHFQLIYNLTLCELNGTEWLANKFD

SEQ ID NO: 1357 - protein, 34 aa, Porcine reproductive and respiratory syndrome virus; identical to SEQ ID NO: 41

SEQ ID NO: 1358 - protein, 34 aa, Porcine reproductive and respiratory syndrome virus; identical to SEQ ID NO: 41

SEQ ID NO: 1359 - protein, 34 aa, Porcine reproductive and respiratory syndrome virus; identical to SEQ ID NO: 41

SEQ ID NO: 1360 - protein, 34 aa, Porcine reproductive and respiratory syndrome virus
  misc_feature (5)..(5): Xaa can be any naturally occurring amino acid
LVNAXSSSSSHFQLIYNLTLCELNGTDWLAEKFD

SEQ ID NO: 1361 - protein, 34 aa, Porcine reproductive and respiratory syndrome virus; identical to SEQ ID NO: 47

SEQ ID NO: 1362 - protein, 34 aa, Porcine reproductive and respiratory syndrome virus; identical to SEQ ID NO: 66

SEQ ID NO: 1363 - protein, 34 aa, Porcine reproductive and respiratory syndrome virus; identical to SEQ ID NO: 47

SEQ ID NO: 1364 - protein, 34 aa, Porcine reproductive and respiratory syndrome virus; identical to SEQ ID NO: 47

SEQ ID NO: 1365 - protein, 34 aa, Porcine reproductive and respiratory syndrome virus
LVNANSNNSSHLQLIYNLTLCSLNGTDWLANKFD

SEQ ID NO: 1366 - protein, 34 aa, Porcine reproductive and respiratory syndrome virus; identical to SEQ ID NO: 542

SEQ ID NO: 1367 - protein, 34 aa, Porcine reproductive and respiratory syndrome virus; identical to SEQ ID NO: 464

SEQ ID NO: 1368 - protein, 34 aa, Porcine reproductive and respiratory syndrome virus; identical to SEQ ID NO: 47

SEQ ID NO: 1369 - protein, 34 aa, Porcine reproductive and respiratory syndrome virus
LVNADSTSSSHFQLIYNLTLCELNGTDWLSDKFD

SEQ ID NO: 1370 - protein, 34 aa, Porcine reproductive and respiratory syndrome virus; identical to SEQ ID NO: 992

SEQ ID NO: 1371 - protein, 34 aa, Porcine reproductive and respiratory syndrome virus; identical to SEQ ID NO: 47

SEQ ID NO: 1372 - protein, 34 aa, Porcine reproductive and respiratory syndrome virus; identical to SEQ ID NO: 64

SEQ ID NO: 1373 - protein, 34 aa, Porcine reproductive and respiratory syndrome virus; identical to SEQ ID NO: 47

SEQ ID NO: 1374 - protein, 34 aa, Porcine reproductive and respiratory syndrome virus
LVNASSNSSSHLQLIYNLTICELNGTDWLNHKFD

SEQ ID NO: 1375 - protein, 34 aa, Porcine reproductive and respiratory syndrome virus; identical to SEQ ID NO: 544

SEQ ID NO: 1376 - protein, 34 aa, Porcine reproductive and respiratory syndrome virus
IVNASSNSSSHFQLIYNLTLCELNGTDWLANKFN

SEQ ID NO: 1377 - protein, 34 aa, Porcine reproductive and respiratory syndrome virus
LVNASSNSSSHFQLIYNLTLCELNGTDWLAGKFD

SEQ ID NO: 1378 - protein, 34 aa, Porcine reproductive and respiratory syndrome virus
LVNASDNSSSHLQLIYNLTLCELNGTDWLANKFD

SEQ ID NO: 1379 - protein, 34 aa, Porcine reproductive and respiratory syndrome virus
LVDANSNSSSHFQLIYNLTLCELNGTDWLKDHFN

SEQ ID NO: 1380 - protein, 34 aa, Porcine reproductive and respiratory syndrome virus; identical to SEQ ID NO: 992

SEQ ID NO: 1381 - protein, 34 aa, Porcine reproductive and respiratory syndrome virus; identical to SEQ ID NO: 1063

SEQ ID NO: 1382 - protein, 34 aa, Porcine reproductive and respiratory syndrome virus
LVNANSNSSSHFQLIYNLTLCELNGTDWLAENFD

SEQ ID NO: 1383 - protein, 34 aa, Porcine reproductive and respiratory syndrome virus
LVDANSNSSSHLQLIYNLTLCELNGTDWLKDHFN

SEQ ID NO: 1384 - protein, 34 aa, Porcine reproductive and respiratory syndrome virus; identical to SEQ ID NO: 55

SEQ ID NO: 1385 - protein, 34 aa, Porcine reproductive and respiratory syndrome virus; identical to SEQ ID NO: 1316

SEQ ID NO: 1386 - protein, 34 aa, Porcine reproductive and respiratory syndrome virus
LANASADSSSHLQLIYNLTLCELNGTDWLANKFD

SEQ ID NO: 1387 - protein, 34 aa, Porcine reproductive and respiratory syndrome virus; identical to SEQ ID NO: 560

SEQ ID NO: 1388 - protein, 34 aa, Porcine reproductive and respiratory syndrome virus; identical to SEQ ID NO: 560

SEQ ID NO: 1389 - protein, 34 aa, Porcine reproductive and respiratory syndrome virus
LVNANSNSSSHFQLIYNLTLCELNGTDWLAKSFD

SEQ ID NO: 1390 - protein, 34 aa, Porcine reproductive and respiratory syndrome virus; identical to SEQ ID NO: 47

SEQ ID NO: 1391 - protein, 34 aa, Porcine reproductive and respiratory syndrome virus
LVNANSNSSSHFQLIYNLTLCELNGTEWLAEKFD

SEQ ID NO: 1392 - protein, 34 aa, Porcine reproductive and respiratory syndrome virus
LVNAHSNSSSQFQLIYNLTLCELNGTDWLANKFD

SEQ ID NO: 1393 - protein, 34 aa, Porcine reproductive and respiratory syndrome virus; identical to SEQ ID NO: 1389

SEQ ID NO: 1394 - protein, 34 aa, Porcine reproductive and respiratory syndrome virus; identical to SEQ ID NO: 93

SEQ ID NO: 1395 - protein, 34 aa, Porcine reproductive and respiratory syndrome virus; identical to SEQ ID NO: 484

SEQ ID NO: 1396 - protein, 34 aa, Porcine reproductive and respiratory syndrome virus; identical to SEQ ID NO: 93

SEQ ID NO: 1397 - protein, 34 aa, Porcine reproductive and respiratory syndrome virus; identical to SEQ ID NO: 565

SEQ ID NO: 1398 - protein, 34 aa, Porcine reproductive and respiratory syndrome virus
LVNANSNSSSHFQLIYNLTLCELNGTDWLNEKFD

SEQ ID NO: 1399 - protein, 34 aa, Porcine reproductive and respiratory syndrome virus; identical to SEQ ID NO: 544

SEQ ID NO: 1400 - protein, 34 aa, Porcine reproductive and respiratory syndrome virus; identical to SEQ ID NO: 45

SEQ ID NO: 1401 - protein, 34 aa, Porcine reproductive and respiratory syndrome virus; identical to SEQ ID NO: 546

SEQ ID NO: 1402 - protein, 34 aa, Porcine reproductive and respiratory syndrome virus; identical to SEQ ID NO: 66

SEQ ID NO: 1403 - protein, 34 aa, Porcine reproductive and respiratory syndrome virus; identical to SEQ ID NO: 655

SEQ ID NO: 1404 - protein, 34 aa, Porcine reproductive and respiratory syndrome virus
LVDANSNSSSHFQLIYNLTLCELNGTDWLKNHFN

SEQ ID NO: 1405 - protein, 34 aa, Porcine reproductive and respiratory syndrome virus; identical to SEQ ID NO: 47

SEQ ID NO: 1406 - protein, 34 aa, Porcine reproductive and respiratory syndrome virus
IVNANSNSSSHFQLIYNLTICELNGTDWLNGKFD

SEQ ID NO: 1407 - protein, 34 aa, Porcine reproductive and respiratory syndrome virus; identical to SEQ ID NO: 172

SEQ ID NO: 1408 - protein, 34 aa, Porcine reproductive and respiratory syndrome virus; identical to SEQ ID NO: 1063

SEQ ID NO: 1409 - protein, 34 aa, Porcine reproductive and respiratory syndrome virus
LVNASSNSSSHFQLIYNLTLCELNGTEWLSNKFD

SEQ ID NO: 1410 - protein, 34 aa, Porcine reproductive and respiratory syndrome virus; identical to SEQ ID NO: 172

SEQ ID NO: 1411 - protein, 34 aa, Porcine reproductive and respiratory syndrome virus; identical to SEQ ID NO: 544

SEQ ID NO: 1412 - protein, 34 aa, Porcine reproductive and respiratory syndrome virus
IVNANSNSSSHLQLIYNLTLCELNGTDWLGSRFD

SEQ ID NO: 1413 - protein, 34 aa, Porcine reproductive and respiratory syndrome virus
  misc_feature (14)..(14): Xaa can be any naturally occurring amino acid
IVNASSNNSSHFQXIYNLTLCELNGTDWLANKFD

SEQ ID NO: 1414 - protein, 34 aa, Porcine reproductive and respiratory syndrome virus
IVNASSNNSSHFQSIYNLTLCELNGTDWLANKFD

SEQ ID NO: 1415 - protein, 34 aa, Porcine reproductive and respiratory syndrome virus
IVNASSNSSSHFQLIYNLTLCELNGTEWLVNKFD

SEQ ID NO: 1416 - protein, 34 aa, Porcine reproductive and respiratory syndrome virus
LVNANSASSSHFQLIYNLTLCELNGTDWLAGKFD

SEQ ID NO: 1417 - protein, 34 aa, Porcine reproductive and respiratory syndrome virus
LVNASTNSSSHFQLIYNLTLCELNGTDWLAEKFD

SEQ ID NO: 1418 - protein, 34 aa, Porcine reproductive and respiratory syndrome virus
IVNANSNSSSHFQLIYNLTICELNGTDWLNEKFD

SEQ ID NO: 1419 - protein, 34 aa, Porcine reproductive and respiratory syndrome virus
IVNANSNSSSHFQLIYNLTLCELNGTDWLADKFD

SEQ ID NO: 1420 - protein, 34 aa, Porcine reproductive and respiratory syndrome virus
LVNANSNNSSHFQLIYNLTLCELNGTDWLANKFD

SEQ ID NO: 1421 - protein, 34 aa, Porcine reproductive and respiratory syndrome virus; identical to SEQ ID NO: 47

SEQ ID NO: 1422 - protein, 34 aa, Porcine reproductive and respiratory syndrome virus; identical to SEQ ID NO: 626

SEQ ID NO: 1423 - protein, 34 aa, Porcine reproductive and respiratory syndrome virus
LVNANSNSSSHFQLIYNLTLCELNGTEWLADRFD

SEQ ID NO: 1424 - protein, 34 aa, Porcine reproductive and respiratory syndrome virus; identical to SEQ ID NO: 626

SEQ ID NO: 1425 - protein, 34 aa, Porcine reproductive and respiratory syndrome virus; identical to SEQ ID NO: 55

SEQ ID NO: 1426 - protein, 34 aa, Porcine reproductive and respiratory syndrome virus
IVNANSNSSSHFQLIYNLTLCELNGTEWLADKFD

SEQ ID NO: 1427 - protein, 34 aa, Porcine reproductive and respiratory syndrome virus; identical to SEQ ID NO: 1142

SEQ ID NO: 1428 - protein, 34 aa, Porcine reproductive and respiratory syndrome virus
PVNANGNSSSKLQLIYNLTLCELNGTDWLANRFD

SEQ ID NO: 1429 - protein, 34 aa, Porcine reproductive and respiratory syndrome virus
LVNANSSSSSHFQLIYNLTLCELNGTDWLRNKFD

SEQ ID NO: 1430 - protein, 34 aa, Porcine reproductive and respiratory syndrome virus
LVNANSNSSSHFQLIYNLTLCELNGTDWLNGKFD

SEQ ID NO: 1431 - protein, 34 aa, Porcine reproductive and respiratory syndrome virus
LVNANSNSSSHFQLIYNLTLCELNGTDWLANKFE

SEQ ID NO: 1432 - protein, 34 aa, Porcine reproductive and respiratory syndrome virus
IANASNBSSSHLQLIYNLTLCELNGTDWLANKFD

SEQ ID NO: 1433 - protein, 34 aa, Porcine reproductive and respiratory syndrome virus
IVNANSNSSSHFQLIYNLTICELNGTDWLNNNFD

SEQ ID NO: 1434 - protein, 34 aa, Porcine reproductive and respiratory syndrome virus; identical to SEQ ID NO: 596

SEQ ID NO: 1435 - protein, 34 aa, Porcine reproductive and respiratory syndrome virus; identical to SEQ ID NO: 55

SEQ ID NO: 1436 - protein, 34 aa, Porcine reproductive and respiratory syndrome virus; identical to SEQ ID NO: 686

SEQ ID NO: 1437 - protein, 34 aa, Porcine reproductive and respiratory syndrome virus; identical to SEQ ID NO: 759

SEQ ID NO: 1438 - protein, 34 aa, Porcine reproductive and respiratory syndrome virus
LVNANNSSSSHLQLIYNLTLCELNGTEWLANKFD

SEQ ID NO: 1439 - protein, 34 aa, Porcine reproductive and respiratory syndrome virus
LVNASTNSSSHFQLIYNLTLCELNGTDWLAKKFD

SEQ ID NO: 1440 - protein, 34 aa, Porcine reproductive and respiratory syndrome virus; identical to SEQ ID NO: 617

SEQ ID NO: 1441 - protein, 34 aa, Porcine reproductive and respiratory syndrome virus; identical to SEQ ID NO: 49

SEQ ID NO: 1442 - protein, 34 aa, Porcine reproductive and respiratory syndrome virus; identical to SEQ ID NO: 49

SEQ ID NO: 1443 - protein, 34 aa, Porcine reproductive and respiratory syndrome virus; identical to SEQ ID NO: 49

SEQ ID NO: 1444 - protein, 34 aa, Porcine reproductive and respiratory syndrome virus; identical to SEQ ID NO: 49

SEQ ID NO: 1445 - protein, 34 aa, Porcine reproductive and respiratory syndrome virus; identical to SEQ ID NO: 1379

SEQ ID NO: 1446 - protein, 34 aa, Porcine reproductive and respiratory syndrome virus; identical to SEQ ID NO: 737

SEQ ID NO: 1447 - protein, 34 aa, Porcine reproductive and respiratory syndrome virus; identical to SEQ ID NO: 1376

SEQ ID NO: 1448 - protein, 34 aa, Porcine reproductive and respiratory syndrome virus; identical to SEQ ID NO: 55

SEQ ID NO: 1449 - protein, 34 aa, Porcine reproductive and respiratory syndrome virus; identical to SEQ ID NO: 55

SEQ ID NO: 1450 - protein, 34 aa, Porcine reproductive and respiratory syndrome virus; identical to SEQ ID NO: 1377

SEQ ID NO: 1451 - protein, 34 aa, Porcine reproductive and respiratory syndrome virus
LVNASSNSSSHFQLIYNLTLCELNGTDWLNNKFD

SEQ ID NO: 1452 - protein, 34 aa, Porcine reproductive and respiratory syndrome virus; identical to SEQ ID NO: 47

SEQ ID NO: 1453 - protein, 34 aa, Porcine reproductive and respiratory syndrome virus
LVNANSSSSSHIQLIYNLTLCELNGTDWLTNKFD

SEQ ID NO: 1454 - protein, 34 aa, Porcine reproductive and respiratory syndrome virus; identical to SEQ ID NO: 469

SEQ ID NO: 1455 - protein, 34 aa, Porcine reproductive and respiratory syndrome virus
LVNANSNSSSHLQLIYNLTICELNGTDWLKDKFE

SEQ ID NO: 1456 - protein, 34 aa, Porcine reproductive and respiratory syndrome virus
LVNANSNSSSHLQLIYNLTLCELNGTDWLASKFD

SEQ ID NO: 1457 - protein, 34 aa, Porcine reproductive and respiratory syndrome virus
LVNAGNSSSSHLQLIYNLTLCELNGTDWLANKFD

SEQ ID NO: 1458 - protein, 34 aa, Porcine reproductive and respiratory syndrome virus; identical to SEQ ID NO: 43

SEQ ID NO: 1459 - protein, 34 aa, Porcine reproductive and respiratory syndrome virus
LVNANSNSSSHIQLIYNLTLCELNGTDWLAENFD

SEQ ID NO: 1460 - protein, 34 aa, Porcine reproductive and respiratory syndrome virus; identical to SEQ ID NO: 47

SEQ ID NO: 1461 - protein, 34 aa, Porcine reproductive and respiratory syndrome virus; identical to SEQ ID NO: 47

SEQ ID NO: 1462 - protein, 34 aa, Porcine reproductive and respiratory syndrome virus; identical to SEQ ID NO: 47

SEQ ID NO: 1463 - protein, 34 aa, Porcine reproductive and respiratory syndrome virus; identical to SEQ ID NO: 64

SEQ ID NO: 1464 - protein, 34 aa, Porcine reproductive and respiratory syndrome virus; identical to SEQ ID NO: 47

SEQ ID NO: 1465 - protein, 34 aa, Porcine reproductive and respiratory syndrome virus; identical to SEQ ID NO: 484

SEQ ID NO: 1466 - protein, 34 aa, Porcine reproductive and respiratory syndrome virus
LANASDNSSSHLQLIYNLTLCELNGTDWLTNKFD

SEQ ID NO: 1467 - protein, 34 aa, Porcine reproductive and respiratory syndrome virus; identical to SEQ ID NO: 55

SEQ ID NO: 1468 - protein, 34 aa, Porcine reproductive and respiratory syndrome virus; identical to SEQ ID NO: 236

SEQ ID NO: 1469 - protein, 34 aa, Porcine reproductive and respiratory syndrome virus
PANASNDSSSHLQLIYNLTLCELNGTDWLAKKFD

SEQ ID NO: 1470 - protein, 34 aa, Porcine reproductive and respiratory syndrome virus
LANASNNSSSHLQLIYNLTLCELNGTDWLAKKFD

SEQ ID NO: 1471 - protein, 34 aa, Porcine reproductive and respiratory syndrome virus
LVNANSSSSSHFQLIYNLTLCELNGTDWLASKFD

SEQ ID NO: 1472 - protein, 34 aa, Porcine reproductive and respiratory syndrome virus; identical to SEQ ID NO: 39

SEQ ID NO: 1473 - protein, 34 aa, Porcine reproductive and respiratory syndrome virus; identical to SEQ ID NO: 502

SEQ ID NO: 1474 - protein, 34 aa, Porcine reproductive and respiratory syndrome virus; identical to SEQ ID NO: 655

SEQ ID NO: 1475 - protein, 34 aa, Porcine reproductive and respiratory syndrome virus; identical to SEQ ID NO: 560

SEQ ID NO: 1476 - protein, 34 aa, Porcine reproductive and respiratory syndrome virus; identical to SEQ ID NO: 572

SEQ ID NO: 1477 - protein, 34 aa, Porcine reproductive and respiratory syndrome virus; identical to SEQ ID NO: 47

SEQ ID NO: 1478 - protein, 34 aa, Porcine reproductive and respiratory syndrome virus; identical to SEQ ID NO: 47

SEQ ID NO: 1479 - protein, 34 aa, Porcine reproductive and respiratory syndrome virus; identical to SEQ ID NO: 47

SEQ ID NO: 1480 - protein, 34 aa, Porcine reproductive and respiratory syndrome virus; identical to SEQ ID NO: 39

SEQ ID NO: 1481 - protein, 34 aa, Porcine reproductive and respiratory syndrome virus; identical to SEQ ID NO: 46

SEQ ID NO: 1482 - protein, 34 aa, Porcine reproductive and respiratory syndrome virus; identical to SEQ ID NO: 55

SEQ ID NO: 1483 - protein, 34 aa, Porcine reproductive and respiratory syndrome virus; identical to SEQ ID NO: 55

SEQ ID NO: 1484 - protein, 34 aa, Porcine reproductive and respiratory syndrome virus; identical to SEQ ID NO: 256

SEQ ID NO: 1485 - protein, 34 aa, Porcine reproductive and respiratory syndrome virus
LVNANSSSSSHLQLIYNLTLCELNGTDWLAGKFD

SEQ ID NO: 1486 - protein, 34 aa, Porcine reproductive and respiratory syndrome virus; identical to SEQ ID NO: 38

SEQ ID NO: 1487 - protein, 34 aa, Porcine reproductive and respiratory syndrome virus; identical to SEQ ID NO: 47

SEQ ID NO: 1488 - protein, 34 aa, Porcine reproductive and respiratory syndrome virus; identical to SEQ ID NO: 47

SEQ ID NO: 1489 - protein, 34 aa, Porcine reproductive and respiratory syndrome virus; identical to SEQ ID NO: 47

SEQ ID NO: 1490 - protein, 34 aa, Porcine reproductive and respiratory syndrome virus; identical to SEQ ID NO: 55

SEQ ID NO: 1491 - protein, 34 aa, Porcine reproductive and respiratory syndrome virus; identical to SEQ ID NO: 484

SEQ ID NO: 1492 - protein, 34 aa, Porcine reproductive and respiratory syndrome virus; identical to SEQ ID NO: 655

SEQ ID NO: 1493 - protein, 34 aa, Porcine reproductive and respiratory syndrome virus; identical to SEQ ID NO: 694

SEQ ID NO: 1494 - protein, 34 aa, Porcine reproductive and respiratory syndrome virus; identical to SEQ ID NO: 47

SEQ ID NO: 1495 - protein, 34 aa, Porcine reproductive and respiratory syndrome virus; identical to SEQ ID NO: 47

SEQ ID NO: 1496 - protein, 34 aa, Porcine reproductive and respiratory syndrome virus; identical to SEQ ID NO: 47

SEQ ID NO: 1497 - protein, 34 aa, Porcine reproductive and respiratory syndrome virus; identical to SEQ ID NO: 487

SEQ ID NO: 1498 - protein, 34 aa, Porcine reproductive and respiratory syndrome virus; identical to SEQ ID NO: 55

SEQ ID NO: 1499 - protein, 34 aa, Porcine reproductive and respiratory syndrome virus; identical to SEQ ID NO: 475

SEQ ID NO: 1500 - protein, 34 aa, Porcine reproductive and respiratory syndrome virus; identical to SEQ ID NO: 188

SEQ ID NO: 1501 - protein, 34 aa, Porcine reproductive and respiratory syndrome virus
LVNANSNRSSHLQLIYNLTLCELNGTDWLKDKFD

SEQ ID NO: 1502 - protein, 34 aa, Porcine reproductive and respiratory syndrome virus; identical to SEQ ID NO: 862

SEQ ID NO: 1503 - protein, 34 aa, Porcine reproductive and respiratory syndrome virus; identical to SEQ ID NO: 188

SEQ ID NO: 1504 - protein, 34 aa, Porcine reproductive and respiratory syndrome virus; identical to SEQ ID NO: 519

SEQ ID NO: 1505 - protein, 34 aa, Porcine reproductive and respiratory syndrome virus
LVNANSSSSSHFQLIYNLTLCELNGTDWLANKFD

SEQ ID NO: 1506 - protein, 34 aa, Porcine reproductive and respiratory syndrome virus; identical to SEQ ID NO: 188

SEQ ID NO: 1507 - protein, 34 aa, Porcine reproductive and respiratory syndrome virus; identical to SEQ ID NO: 1005

SEQ ID NO: 1508 - protein, 34 aa, Porcine reproductive and respiratory syndrome virus; identical to SEQ ID NO: 680

SEQ ID NO: 1509 - protein, 34 aa, Porcine reproductive and respiratory syndrome virus
PVNANNTSSSHFQSIYNLTLCELNGTDWLASHFD

SEQ ID NO: 1510 - protein, 34 aa, Porcine reproductive and respiratory syndrome virus
LVNASNNNSSHLQLIYNLTICELNGTDWLNNKFD

SEQ ID NO: 1511 - protein, 34 aa, Porcine reproductive and respiratory syndrome virus; identical to SEQ ID NO: 1510

SEQ ID NO: 1512 - protein, 34 aa, Porcine reproductive and respiratory syndrome virus; identical to SEQ ID NO: 267

SEQ ID NO: 1513 - protein, 34 aa, Porcine reproductive and respiratory syndrome virus
  misc_feature (6)..(6): Xaa can be any naturally occurring amino acid
LVNASXNSSSHLQLIYNLTICELNGTEWLNNHFS

SEQ ID NO: 1514 - protein, 34 aa, Porcine reproductive and respiratory syndrome virus; identical to SEQ ID NO: 1271

SEQ ID NO: 1515 - protein, 34 aa, Porcine reproductive and respiratory syndrome virus
  misc_feature (5)..(5): Xaa can be any naturally occurring amino acid
LVNAXSNSSSHLQLIYNLTLCELNGTDWLRDKFD

SEQ ID NO: 1516 - protein, 34 aa, Porcine reproductive and respiratory syndrome virus
LVNASSNSSSHLQLIYNLTICELNGTGWLNNHFS

SEQ ID NO: 1517 - protein, 34 aa, Porcine reproductive and respiratory syndrome virus
  misc_feature (5)..(5): Xaa can be any naturally occurring amino acid
LVNAXGNSSSHLQLIYNLTICELNGTDWLNDHFS

SEQ ID NO: 1518 - protein, 34 aa, Porcine reproductive and respiratory syndrome virus; identical to SEQ ID NO: 267

SEQ ID NO: 1519 - protein, 34 aa, Porcine reproductive and respiratory syndrome virus; identical to SEQ ID NO: 1505

SEQ ID NO: 1520 - protein, 34 aa, Porcine reproductive and respiratory syndrome virus; identical to SEQ ID NO: 1061

SEQ ID NO: 1521 - protein, 34 aa, Porcine reproductive and respiratory syndrome virus
LVNADSSSSSHLQLIYNLTICELNGTDWLNTKFD

SEQ ID NO: 1522 - protein, 34 aa, Porcine reproductive and respiratory syndrome virus
  misc_feature (7)..(7): Xaa can be any naturally occurring amino acid
LVNASNXSSSHLQLIYNLTICELNGTDWLNEHFS

SEQ ID NO: 1523 - protein, 34 aa, Porcine reproductive and respiratory syndrome virus; identical to SEQ ID NO: 878

SEQ ID NO: 1524 - protein, 34 aa, Porcine reproductive and respiratory syndrome virus; identical to SEQ ID NO: 188

SEQ ID NO: 1525 - protein, 34 aa, Porcine reproductive and respiratory syndrome virus; identical to SEQ ID NO: 756

SEQ ID NO: 1526 - protein, 34 aa, Porcine reproductive and respiratory syndrome virus
LVNAGNHSSSHLQLIYNLTICELNGTDWLNNRFS

SEQ ID NO: 1527 - protein, 34 aa, Porcine reproductive and respiratory syndrome virus
LVNANSSSSSHFQLIYNLTLCELNGTDWLANRFD

SEQ ID NO: 1528 - protein, 34 aa, Porcine reproductive and respiratory syndrome virus
LVNASNNNSSHLQLIYNLTICELNGTDWLNDHFS

SEQ ID NO: 1529 - protein, 34 aa, Porcine reproductive and respiratory syndrome virus; identical to SEQ ID NO: 493

SEQ ID NO: 1530 - protein, 34 aa, Porcine reproductive and respiratory syndrome virus
  misc_feature (5)..(5): Xaa can be any naturally occurring amino acid
LVNAXSNNSSHLQLIYNLTICELNGTDWLNEHFS

SEQ ID NO: 1531 - protein, 34 aa, Porcine reproductive and respiratory syndrome virus
LVNAKSNSSSHLQLIYNLTICELNGTDWLNNHFS

SEQ ID NO: 1532 - protein, 34 aa, Porcine reproductive and respiratory syndrome virus
LVNANSNSSSHLQSIYNLTICELNGTDWLNSHFS

SEQ ID NO: 1533 - protein, 34 aa, Porcine reproductive and respiratory syndrome virus; identical to SEQ ID NO: 827

SEQ ID NO: 1534 - protein, 34 aa, Porcine reproductive and respiratory syndrome virus
LVNASSNGSSHLQLIYNLTLCELNGTDWLKNKFD

SEQ ID NO: 1535 - protein, 34 aa, Porcine reproductive and respiratory syndrome virus; identical to SEQ ID NO: 475

SEQ ID NO: 1536 - protein, 34 aa, Porcine reproductive and respiratory syndrome virus; identical to SEQ ID NO: 75

SEQ ID NO: 1537 - protein, 34 aa, Porcine reproductive and respiratory syndrome virus
LVNADSNNSSQLQLIYNLTICELNGTDWLDNHFS

SEQ ID NO: 1538 - protein, 34 aa, Porcine reproductive and respiratory syndrome virus; identical to SEQ ID NO: 996

SEQ ID NO: 1539 - protein, 34 aa, Porcine reproductive and respiratory syndrome virus
LVNASSNSSSHLQLIYNLTICELNGTGWLNDHFS

SEQ ID NO: 1540 - protein, 34 aa, Porcine reproductive and respiratory syndrome virus; identical to SEQ ID NO: 236

SEQ ID NO: 1541 - protein, 34 aa, Porcine reproductive and respiratory syndrome virus
LVNADSNNSSHLQLIYKLTICELNGTDWLDNHFS

SEQ ID NO: 1542 - protein, 34 aa, Porcine reproductive and respiratory syndrome virus
LVNANSNSSSHLQLIYNLTLCELNGTDWLEGKFD

SEQ ID NO: 1543 - protein, 34 aa, Porcine reproductive and respiratory syndrome virus
LVNADSNNSSHLQLIYNLTICELNGTDWLNEHFS

SEQ ID NO: 1544 - protein, 34 aa, Porcine reproductive and respiratory syndrome virus; identical to SEQ ID NO: 1128

SEQ ID NO: 1545 - protein, 34 aa, Porcine reproductive and respiratory syndrome virus; identical to SEQ ID NO: 1100

SEQ ID NO: 1546 - protein, 34 aa, Porcine reproductive and respiratory syndrome virus
LVNAENNSSSHLQLIYNLTICELNGTDWLNRKFD

SEQ ID NO: 1547 - protein, 34 aa, Porcine reproductive and respiratory syndrome virus; identical to SEQ ID NO: 475

SEQ ID NO: 1548 - protein, 34 aa, Porcine reproductive and respiratory syndrome virus
SFVDGNDTNSTYQYIYNLTICELNGTNWLSNHFE

SEQ ID NO: 1549 - protein, 34 aa, Porcine reproductive and respiratory syndrome virus; identical to SEQ ID NO: 680

SEQ ID NO: 1550 - protein, 34 aa, Porcine reproductive and respiratory syndrome virus
LVNASGNSSSHLQLIYNLTICELNGTDWLDKHFS

SEQ ID NO: 1551 - protein, 34 aa, Porcine reproductive and respiratory syndrome virus; identical to SEQ ID NO: 188

SEQ ID NO: 1552 - protein, 34 aa, Porcine reproductive and respiratory syndrome virus
LVNANSNGSSHLQLIYNLTLCELNGTDWLANRFD

SEQ ID NO: 1553 - protein, 34 aa, Porcine reproductive and respiratory syndrome virus
LVNANSNSSSHFQLIYNLTLCELNGTDWLANRFD

SEQ ID NO: 1554 - protein, 34 aa, Porcine reproductive and respiratory syndrome virus; identical to SEQ ID NO: 910

SEQ ID NO: 1555 - protein, 34 aa, Porcine reproductive and respiratory syndrome virus
LVNANSDNSSHLQLIYNLTICELNGTDWLNEHFS

SEQ ID NO: 1556 - protein, 34 aa, Porcine reproductive and respiratory syndrome virus; identical to SEQ ID NO: 680

SEQ ID NO: 1557 - protein, 34 aa, Porcine reproductive and respiratory syndrome virus
LVNANSSSSSHFQLIYSLTLCELNGTDWLANKFD

SEQ ID NO: 1558 - protein, 34 aa, Porcine reproductive and respiratory syndrome virus; identical to SEQ ID NO: 1271

SEQ ID NO: 1559 - protein, 34 aa, Porcine reproductive and respiratory syndrome virus
LVNASNNSSSHFQLIYNLTICELNGTDWLNNHFS

SEQ ID NO: 1560 - protein, 34 aa, Porcine reproductive and respiratory syndrome virus
LVNASSNSSSHLQLIYNLTLCELNGTDWLRNKFD

SEQ ID NO: 1561 - protein, 34 aa, Porcine reproductive and respiratory syndrome virus
LVNANSSSSSHFQLIYNLTLCELNGTDWLNKHFN

SEQ ID NO: 1562 - protein, 34 aa, Porcine reproductive and respiratory syndrome virus
LVNANSDSSSHLQLIYNLTICELNGTDWLDEHFS

SEQ ID NO: 1563 - protein, 34 aa, Porcine reproductive and respiratory syndrome virus
LVDANSNSSSHLQLIYNLTLCELNGTDWLANRFD

SEQ ID NO: 1564 - protein, 34 aa, Porcine reproductive and respiratory syndrome virus; identical to SEQ ID NO: 1227

SEQ ID NO: 1565 - protein, 34 aa, Porcine reproductive and respiratory syndrome virus; identical to SEQ ID NO: 1552

SEQ ID NO: 1566 - protein, 34 aa, Porcine reproductive and respiratory syndrome virus; identical to SEQ ID NO: 55

SEQ ID NO: 1567 - protein, 34 aa, Porcine reproductive and respiratory syndrome virus
LVNANSNSSSHFQLIYNLTLCELNGTDWLASKFD

SEQ ID NO: 1568 - protein, 34 aa, Porcine reproductive and respiratory syndrome virus
LVNANSNSSSHLQLIYNLTICELNGTEWLGSHFS

SEQ ID NO: 1569 - protein, 34 aa, Porcine reproductive and respiratory syndrome virus; identical to SEQ ID NO: 1552

SEQ ID NO: 1570 - protein, 34 aa, Porcine reproductive and respiratory syndrome virus
LVNANSNSSSHFQLIYNLTICELNGTEWLSKHFS

SEQ ID NO: 1571 - protein, 34 aa, Porcine reproductive and respiratory syndrome virus
LVNADHNSSSHLQLIYNLTICELNGTDWLDKKFD

SEQ ID NO: 1572 - protein, 34 aa, Porcine reproductive and respiratory syndrome virus; identical to SEQ ID NO: 1571

SEQ ID NO: 1573 - protein, 34 aa, Porcine reproductive and respiratory syndrome virus; identical to SEQ ID NO: 473

SEQ ID NO: 1574 - protein, 34 aa, Porcine reproductive and respiratory syndrome virus; identical to SEQ ID NO: 267

SEQ ID NO: 1575 - protein, 34 aa, Porcine reproductive and respiratory syndrome virus
LANASBDSSSHLQLIYNLTLCELNGTDWLANKFD

SEQ ID NO: 1576 - protein, 34 aa, Porcine reproductive and respiratory syndrome virus; identical to SEQ ID NO: 1031

SEQ ID NO: 1577 - protein, 34 aa, Porcine reproductive and respiratory syndrome virus; identical to SEQ ID NO: 680

SEQ ID NO: 1578 - protein, 34 aa, Porcine reproductive and respiratory syndrome virus; identical to SEQ ID NO: 837

SEQ ID NO: 1579 - protein, 34 aa, Porcine reproductive and respiratory syndrome virus; identical to SEQ ID NO: 55

SEQ ID NO: 1580 - protein, 34 aa, Porcine reproductive and respiratory syndrome virus; identical to SEQ ID NO: 1301

SEQ ID NO: 1581 - protein, 34 aa, Porcine reproductive and respiratory syndrome virus
LVNANSNNSSHLQLIYNLTICELNGTDWLNKHFS

SEQ ID NO: 1582 - protein, 34 aa, Porcine reproductive and respiratory syndrome virus; identical to SEQ ID NO: 223

SEQ ID NO: 1583 - protein, 34 aa, Porcine reproductive and respiratory syndrome virus; identical to SEQ ID NO: 1061

SEQ ID NO: 1584 - protein, 34 aa, Porcine reproductive and respiratory syndrome virus
LVNANSNSSSHLQLIYNLTICELNGTDWLNKKFD

SEQ ID NO: 1585 - protein, 34 aa, Porcine reproductive and respiratory syndrome virus
LVNASSNSSSHLQLIYNLTICELNGTDWLNSQFS

SEQ ID NO: 1586 - protein, 34 aa, Porcine reproductive and respiratory syndrome virus; identical to SEQ ID NO: 1537

SEQ ID NO: 1587 - protein, 34 aa, Porcine reproductive and respiratory syndrome virus; identical to SEQ ID NO: 1207

SEQ ID NO: 1588 - protein, 34 aa, Porcine reproductive and respiratory syndrome virus
LVNASNHSSSHLQLIYNLTICELNGTDWLNNHFS

SEQ ID NO: 1589 - protein, 34 aa, Porcine reproductive and respiratory syndrome virus
LVNADSNNSSQLQLIYNLTICELNGTDWLNNHFS

SEQ ID NO: 1590 - protein, 34 aa, Porcine reproductive and respiratory syndrome virus; identical to SEQ ID NO: 1589

SEQ ID NO: 1591 - protein, 34 aa, Porcine reproductive and respiratory syndrome virus; identical to SEQ ID NO: 509

SEQ ID NO: 1592 - protein, 34 aa, Porcine reproductive and respiratory syndrome virus; identical to SEQ ID NO: 486

SEQ ID NO: 1593 - protein, 34 aa, Porcine reproductive and respiratory syndrome virus
LANADNNSSSHLQLIYNLTLCELNGTDWLANKFD

SEQ ID NO: 1594 - protein, 34 aa, Porcine reproductive and respiratory syndrome virus; identical to SEQ ID NO: 876

SEQ ID NO: 1595 - protein, 34 aa, Porcine reproductive and respiratory syndrome virus; identical to SEQ ID NO: 223

SEQ ID NO: 1596 - protein, 34 aa, Porcine reproductive and respiratory syndrome virus; identical to SEQ ID NO: 47

SEQ ID NO: 1597 - protein, 34 aa, Porcine reproductive and respiratory syndrome virus; identical to SEQ ID NO: 350

SEQ ID NO: 1598 - protein, 34 aa, Porcine reproductive and respiratory syndrome virus
LVNANSTSSSYSQLIYNLTLCELNGTDWLNGHFS

SEQ ID NO: 1599 - protein, 34 aa, Porcine reproductive and respiratory syndrome virus
LANADNNSSSHLQLIYNLTLCELNGTDWLADKFD

SEQ ID NO: 1600 - protein, 34 aa, Porcine reproductive and respiratory syndrome virus; identical to SEQ ID NO: 1271

SEQ ID NO: 1601 - protein, 34 aa, Porcine reproductive and respiratory syndrome virus
LVNASGNSSSHFQLIYNLTICELNGTGWLNDHFS

SEQ ID NO: 1602 - protein, 34 aa, Porcine reproductive and respiratory syndrome virus
LVNARSNSSSHLQLIYNLTICELNGTDWLNNHFS

SEQ ID NO: 1603 - protein, 34 aa, Porcine reproductive and respiratory syndrome virus; identical to SEQ ID NO: 1271

SEQ ID NO: 1604 - protein, 34 aa, Porcine reproductive and respiratory syndrome virus
LVNASSNSSSHIQLIYNLTLCELNGTDWLSGKFD

SEQ ID NO: 1605 - protein, 34 aa, Porcine reproductive and respiratory syndrome virus; identical to SEQ ID NO: 680

SEQ ID NO: 1606 - protein, 34 aa, Porcine reproductive and respiratory syndrome virus; identical to SEQ ID NO: 680

SEQ ID NO: 1607 - protein, 34 aa, Porcine reproductive and respiratory syndrome virus
LVNANSNHSSHFQLIYNLTLCELNGTDWLANKFD

SEQ ID NO: 1608 - protein, 34 aa, Porcine reproductive and respiratory syndrome virus
LVNASNBSSSHLQLIYNLTICELNGTDWLNEHFS

SEQ ID NO: 1609 - protein, 34 aa, Porcine reproductive and respiratory syndrome virus
LVNANSNSSSHLQSIYNLTICELNGTEWLDEHFS

SEQ ID NO: 1610 - protein, 34 aa, Porcine reproductive and respiratory syndrome virus; identical to SEQ ID NO: 1288

SEQ ID NO: 1611 - protein, 34 aa, Porcine reproductive and respiratory syndrome virus; identical to SEQ ID NO: 1236

SEQ ID NO: 1612 - protein, 34 aa, Porcine reproductive and respiratory syndrome virus; identical to SEQ ID NO: 680

SEQ ID NO: 1613 - protein, 34 aa, Porcine reproductive and respiratory syndrome virus
LVNANSNSSSHLQLIYNLTLCELNGTDWLKGKFN

SEQ ID NO: 1614 - protein, 34 aa, Porcine reproductive and respiratory syndrome virus; identical to SEQ ID NO: 267

SEQ ID NO: 1615 - protein, 34 aa, Porcine reproductive and respiratory syndrome virus; identical to SEQ ID NO: 680

SEQ ID NO: 1616 - protein, 34 aa, Porcine reproductive and respiratory syndrome virus; identical to SEQ ID NO: 462

SEQ ID NO: 1617 - protein, 34 aa, Porcine reproductive and respiratory syndrome virus
LVSANGNSSSHLQLIYNLTICELNGTDWLNNHFS

SEQ ID NO: 1618 - protein, 34 aa, Porcine reproductive and respiratory syndrome virus
LVNADSNSSSHLQLIYNLTLCELNGTDWLKDKFD

SEQ ID NO: 1619 - protein, 34 aa, Porcine reproductive and respiratory syndrome virus; identical to SEQ ID NO: 470

SEQ ID NO: 1620 - protein, 34 aa, Porcine reproductive and respiratory syndrome virus
LVNAGNSSSSHLQLIYNLTICELNGTDWLKNHFS

SEQ ID NO: 1621 - protein, 34 aa, Porcine reproductive and respiratory syndrome virus
LANASGNSSSHLQLIYNLTLCELNGTDWLADKFD

SEQ ID NO: 1622 - protein, 34 aa, Porcine reproductive and respiratory syndrome virus
LVNANNDSSSHLQLIYNLTICELNGTDWLGNKFD

SEQ ID NO: 1623 - protein, 34 aa, Porcine reproductive and respiratory syndrome virus; identical to SEQ ID NO: 720

SEQ ID NO: 1624 - protein, 34 aa, Porcine reproductive and respiratory syndrome virus
LVNANSNSSSHFQLIYNLTLCELNGTEWLSNKFD

SEQ ID NO: 1625 - protein, 34 aa, Porcine reproductive and respiratory syndrome virus; identical to SEQ ID NO: 1291

SEQ ID NO: 1626 - protein, 34 aa, Porcine reproductive and respiratory syndrome virus; identical to SEQ ID NO: 768

SEQ ID NO: 1627 - protein, 34 aa, Porcine reproductive and respiratory syndrome virus
LVNAHGNSSSHLQLIYNLTICELNGTDWLNNHFS

SEQ ID NO: 1628 - protein, 34 aa, Porcine reproductive and respiratory syndrome virus; identical to SEQ ID NO: 188

SEQ ID NO: 1629 - protein, 34 aa, Porcine reproductive and respiratory syndrome virus; identical to SEQ ID NO: 1291

SEQ ID NO: 1630 - protein, 34 aa, Porcine reproductive and respiratory syndrome virus; identical to SEQ ID NO: 461

SEQ ID NO: 1631 - protein, 34 aa, Porcine reproductive and respiratory syndrome virus; identical to SEQ ID NO: 484

SEQ ID NO: 1632 - protein, 34 aa, Porcine reproductive and respiratory syndrome virus; identical to SEQ ID NO: 680

SEQ ID NO: 1633 - protein, 34 aa, Porcine reproductive and respiratory syndrome virus
LVNASSNSSSHLQLIYNLTICELNGTDWLNEKFD

SEQ ID NO: 1634 - protein, 34 aa, Porcine reproductive and respiratory syndrome virus
LVNASSNSSSHFQLIYNLTICELNGTDWLNNHFS

SEQ ID NO: 1635 - protein, 34 aa, Porcine reproductive and respiratory syndrome virus
LVNADNSSSSHFQLIYNLTLCELNGTEWLANKFD

SEQ ID NO: 1636 - protein, 34 aa, Porcine reproductive and respiratory syndrome virus
LVNANSSSSSHFQLIYNLTLCELNGTDWLADRFD

SEQ ID NO: 1637 - protein, 34 aa, Porcine reproductive and respiratory syndrome virus
LVNASDNSSSHFQLIYNLTLCELNGTDWLANKFD

SEQ ID NO: 1638 - protein, 34 aa, Porcine reproductive and respiratory syndrome virus; identical to SEQ ID NO: 58

SEQ ID NO: 1639 - protein, 34 aa, Porcine reproductive and respiratory syndrome virus; identical to SEQ ID NO: 680

SEQ ID NO: 1640 - protein, 34 aa, Porcine reproductive and respiratory syndrome virus
LVNASSDSSSHLQLIYNLTICELNGTDWLNGHFS

SEQ ID NO: 1641 - protein, 34 aa, Porcine reproductive and respiratory syndrome virus
LVNASSNSSSHLQLIYNLTICELNGTDWLDEHFS

SEQ ID NO: 1642 - protein, 34 aa, Porcine reproductive and respiratory syndrome virus
LANAHSDNSSHLQLIYNLTICELNGTDWLNKHFS

SEQ ID NO: 1643 - protein, 34 aa, Porcine reproductive and respiratory syndrome virus; identical to SEQ ID NO: 188

SEQ ID NO: 1644 - protein, 34 aa, Porcine reproductive and respiratory syndrome virus
LVNARGNSSSHLQLIYNLTICELNGTDWLNNHFS

SEQ ID NO: 1645 - protein, 34 aa, Porcine reproductive and respiratory syndrome virus
LVNANSDSSSHLQLIYNLTICELNGTDWLNNHFS

SEQ ID NO: 1646 - protein, 34 aa, Porcine reproductive and respiratory syndrome virus; identical to SEQ ID NO: 945

SEQ ID NO: 1647 - protein, 34 aa, Porcine reproductive and respiratory syndrome virus; identical to SEQ ID NO: 1121

SEQ ID NO: 1648 - protein, 34 aa, Porcine reproductive and respiratory syndrome virus
LVNASNDSSSHLQLIYNLTICELNGTDWLNSHFS

SEQ ID NO: 1649 - protein, 34 aa, Porcine reproductive and respiratory syndrome virus; identical to SEQ ID NO: 513

SEQ ID NO: 1650 - protein, 34 aa, Porcine reproductive and respiratory syndrome virus; identical to SEQ ID NO: 250

SEQ ID NO: 1651 - protein, 34 aa, Porcine reproductive and respiratory syndrome virus; identical to SEQ ID NO: 475

SEQ ID NO: 1652 - protein, 34 aa, Porcine reproductive and respiratory syndrome virus; identical to SEQ ID NO: 188

SEQ ID NO: 1653 - protein, 34 aa, Porcine reproductive and respiratory syndrome virus; identical to SEQ ID NO: 188

SEQ ID NO: 1654 - protein, 34 aa, Porcine reproductive and respiratory syndrome virus
LVNASSNSSSHLQLIYNLTICELNGTEWLSNHFS

SEQ ID NO: 1655 - protein, 34 aa, Porcine reproductive and respiratory syndrome virus; identical to SEQ ID NO: 910

SEQ ID NO: 1656 - protein, 34 aa, Porcine reproductive and respiratory syndrome virus
  misc_feature (5)..(7): Xaa can be any naturally occurring amino acid
LVNAXXXSSSHLQLIYNLTICELNGTDWLNNHFS

SEQ ID NO: 1657 - protein, 34 aa, Porcine reproductive and respiratory syndrome virus; identical to SEQ ID NO: 720

SEQ ID NO: 1658 - protein, 34 aa, Porcine reproductive and respiratory syndrome virus; identical to SEQ ID NO: 55

SEQ ID NO: 1659 - protein, 34 aa, Porcine reproductive and respiratory syndrome virus; identical to SEQ ID NO: 486

SEQ ID NO: 1660 - protein, 34 aa, Porcine reproductive and respiratory syndrome virus; identical to SEQ ID NO: 680

SEQ ID NO: 1661 - protein, 34 aa, Porcine reproductive and respiratory syndrome virus; identical to SEQ ID NO: 350

SEQ ID NO: 1662 - protein, 34 aa, Porcine reproductive and respiratory syndrome virus; identical to SEQ ID NO: 874

SEQ ID NO: 1663 - protein, 34 aa, Porcine reproductive and respiratory syndrome virus
LVNASGNSSSHLQLIYNLTICELNGTDWLDNHFS

SEQ ID NO: 1664 - protein, 34 aa, Porcine reproductive and respiratory syndrome virus; identical to SEQ ID NO: 350

SEQ ID NO: 1665 - protein, 34 aa, Porcine reproductive and respiratory syndrome virus; identical to SEQ ID NO: 906

SEQ ID NO: 1666 - protein, 34 aa, Porcine reproductive and respiratory syndrome virus
LVNASNDSSSHLQLIYNLTICELNGTDWLDNKFD

SEQ ID NO: 1667 - protein, 34 aa, Porcine reproductive and respiratory syndrome virus; identical to SEQ ID NO: 1121

SEQ ID NO: 1668 - protein, 34 aa, Porcine reproductive and respiratory syndrome virus
LVNANSNSSSHLQLIYNLTICELNGTDWLNDHFS

SEQ ID NO: 1669 - protein, 34 aa, Porcine reproductive and respiratory syndrome virus
LVNANSNSSSHLQLIYNLTLCELNGTQWLAGRFD

SEQ ID NO: 1670 - protein, 34 aa, Porcine reproductive and respiratory syndrome virus; identical to SEQ ID NO: 188

SEQ ID NO: 1671 - protein, 34 aa, Porcine reproductive and respiratory syndrome virus; identical to SEQ ID NO: 47

SEQ ID NO: 1672 - protein, 34 aa, Porcine reproductive and respiratory syndrome virus
LANANSNSSSHLQLIYNLTLCELNGTDWLANRFD

SEQ ID NO: 1673 - protein, 34 aa, Porcine reproductive and respiratory syndrome virus
LANASRNSSSHLQLIYNLTLCELNGTDWLADKFD

SEQ ID NO: 1674 - protein, 34 aa, Porcine reproductive and respiratory syndrome virus; identical to SEQ ID NO: 360

SEQ ID NO: 1675 - protein, 34 aa, Porcine reproductive and respiratory syndrome virus
LVNASNNSSSHLQLIYNLTICELNGTDWLNNKFD

SEQ ID NO: 1676 - protein, 34 aa, Porcine reproductive and respiratory syndrome virus
LVNANSNSSSHLQLIYNLTICELNGTDWLDDKFD

SEQ ID NO: 1677 - protein, 34 aa, Porcine reproductive and respiratory syndrome virus; identical to SEQ ID NO: 360

SEQ ID NO: 1678 - protein, 34 aa, Porcine reproductive and respiratory syndrome virus; identical to SEQ ID NO: 1084

SEQ ID NO: 1679 - protein, 34 aa, Porcine reproductive and respiratory syndrome virus; identical to SEQ ID NO: 1084

SEQ ID NO: 1680 - protein, 34 aa, Porcine reproductive and respiratory syndrome virus; identical to SEQ ID NO: 55

SEQ ID NO: 1681 - protein, 34 aa, Porcine reproductive and respiratory syndrome virus
LVNANSNSSSHLQLIYNLTICELNGTDWLKEKFD

SEQ ID NO: 1682 - protein, 34 aa, Porcine reproductive and respiratory syndrome virus; identical to SEQ ID NO: 1084

SEQ ID NO: 1683 - protein, 34 aa, Porcine reproductive and respiratory syndrome virus
PANASNGSSSHLQLIYNLTLCELNGTDWLANKFD

SEQ ID NO: 1684 - protein, 34 aa, Porcine reproductive and respiratory syndrome virus
PANAGNDSSSHLQLIYNLTLCELNGTDWLANKFD

SEQ ID NO: 1685 - protein, 34 aa, Porcine reproductive and respiratory syndrome virus; identical to SEQ ID NO: 55

SEQ ID NO: 1686 - protein, 34 aa, Porcine reproductive and respiratory syndrome virus
LVSAHSNSSSHLQLIYNLTLCELNGTDWLANKFD

SEQ ID NO: 1687 - protein, 34 aa, Porcine reproductive and respiratory syndrome virus; identical to SEQ ID NO: 21

SEQ ID NO: 1688 - protein, 34 aa, Porcine reproductive and respiratory syndrome virus
LVNAGNNSSSHLQLIYNLTLCELNGTDWLANKFD

SEQ ID NO: 1689 - protein, 34 aa, Porcine reproductive and respiratory syndrome virus
LANANSNSSSHLQLIYNLTLCELNGTDWLADRFD

SEQ ID NO: 1690 - protein, 34 aa, Porcine reproductive and respiratory syndrome virus; identical to SEQ ID NO: 1689

SEQ ID NO: 1691 - protein, 34 aa, Porcine reproductive and respiratory syndrome virus; identical to SEQ ID NO: 1144

SEQ ID NO: 1692 - protein, 34 aa, Porcine reproductive and respiratory syndrome virus; identical to SEQ ID NO: 1017

SEQ ID NO: 1693 - protein, 34 aa, Porcine reproductive and respiratory syndrome virus; identical to SEQ ID NO: 55

SEQ ID NO: 1694 - protein, 34 aa, Porcine reproductive and respiratory syndrome virus; identical to SEQ ID NO: 55

SEQ ID NO: 1695 - protein, 34 aa, Porcine reproductive and respiratory syndrome virus; identical to SEQ ID NO: 172

SEQ ID NO: 1696 - protein, 34 aa, Porcine reproductive and respiratory syndrome virus; identical to SEQ ID NO: 55

SEQ ID NO: 1697 - protein, 34 aa, Porcine reproductive and respiratory syndrome virus; identical to SEQ ID NO: 21

SEQ ID NO: 1698 - protein, 34 aa, Porcine reproductive and respiratory syndrome virus
LANASNNSSSHLQLIYNLTLCELNGTDWLVNKFD

SEQ ID NO: 1699 - protein, 34 aa, Porcine reproductive and respiratory syndrome virus; identical to SEQ ID NO: 47

SEQ ID NO: 1700 - protein, 34 aa, Porcine reproductive and respiratory syndrome virus; identical to SEQ ID NO: 1593

SEQ ID NO: 1701 - protein, 34 aa, Porcine reproductive and respiratory syndrome virus; identical to SEQ ID NO: 484

SEQ ID NO: 1702 - protein, 34 aa, Porcine reproductive and respiratory syndrome virus; identical to SEQ ID NO: 55

SEQ ID NO: 1703 - protein, 34 aa, Porcine reproductive and respiratory syndrome virus; identical to SEQ ID NO: 55

SEQ ID NO: 1704 - protein, 34 aa, Porcine reproductive and respiratory syndrome virus; identical to SEQ ID NO: 55

SEQ ID NO: 1705 - protein, 34 aa, Porcine reproductive and respiratory syndrome virus
LVNANSNSSSHLQLIYNLTLCELNGTDWLAGRFD

SEQ ID NO: 1706 - protein, 34 aa, Porcine reproductive and respiratory syndrome virus
LVNANSNSSSHLQLIYNLTLCELNGTDWLADNFD

SEQ ID NO: 1707 - protein, 34 aa, Porcine reproductive and respiratory syndrome virus; identical to SEQ ID NO: 223

SEQ ID NO: 1708 - protein, 34 aa, Porcine reproductive and respiratory syndrome virus
LVNASSNSSSHLQLIYNLTLCELNGTDWLANRFD

SEQ ID NO: 1709 - protein, 34 aa, Porcine reproductive and respiratory syndrome virus
LANANNDSSSHLQLIYNLTLCELNGTDWLANRFD

SEQ ID NO: 1710 - protein, 34 aa, Porcine reproductive and respiratory syndrome virus; identical to SEQ ID NO: 700

SEQ ID NO: 1711 - protein, 34 aa, Porcine reproductive and respiratory syndrome virus; identical to SEQ ID NO: 1148

SEQ ID NO: 1712 - protein, 34 aa, Porcine reproductive and respiratory syndrome virus; identical to SEQ ID NO: 680

SEQ ID NO: 1713 - protein, 34 aa, Porcine reproductive and respiratory syndrome virus; identical to SEQ ID NO: 874

SEQ ID NO: 1714 - protein, 34 aa, Porcine reproductive and respiratory syndrome virus; identical to SEQ ID NO: 15

SEQ ID NO: 1715 - protein, 34 aa, Porcine reproductive and respiratory syndrome virus; identical to SEQ ID NO: 363

SEQ ID NO: 1716 - protein, 34 aa, Porcine reproductive and respiratory syndrome virus; identical to SEQ ID NO: 364

SEQ ID NO: 1717 - protein, 34 aa, Porcine reproductive and respiratory syndrome virus
LVNASSNNSSHIQLIYNLTLCELNGTDWLAQKFD

SEQ ID NO: 1718 - protein, 34 aa, Porcine reproductive and respiratory syndrome virus
SFADGNGNSSTYQYIYDLTICELNGTAWLSTHFS

SEQ ID NO: 1719 - protein, 34 aa, Porcine reproductive and respiratory syndrome virus
SFADGNGNSSTYQYIYNLTICELNGTAWLSTHFS

SEQ ID NO: 1720 - protein, 34 aa, Porcine reproductive and respiratory syndrome virus
LVNASNNNSSHIQLIYNLTLCELNGTDWLANKFD

SEQ ID NO: 1721 - protein, 34 aa, Porcine reproductive and respiratory syndrome virus
LVNASNNSSSHIQLIYNLTLCELNGTDWLAQKFD

SEQ ID NO: 1722 - protein, 34 aa, Porcine reproductive and respiratory syndrome virus
SFADGNGNSSTYQYIYNLTICELNGTEWLSNHFE

SEQ ID NO: 1723 - protein, 34 aa, Porcine reproductive and respiratory syndrome virus
SFVAGSGNSSTYQYIYNLTICELNGTEWLSSHFD

SEQ ID NO: 1724 - protein, 34 aa, Porcine reproductive and respiratory syndrome virus
SFVVGNGNSSTYQYIYNLTICELNGTTWLSSHFD

SEQ ID NO: 1725 - protein, 34 aa, Porcine reproductive and respiratory syndrome virus; identical to SEQ ID NO: 336

SEQ ID NO: 1726 - protein, 34 aa, Porcine reproductive and respiratory syndrome virus
SFVDGNDNNSTYQYIYNLTICELNGTIWLSSHFV

SEQ ID NO: 1727 - protein, 34 aa, Porcine reproductive and respiratory syndrome virus
SFADGNGNSSTYQYIYNLTICELNGTTWLSSHFS

SEQ ID NO: 1728 - protein, 34 aa, Porcine reproductive and respiratory syndrome virus; identical to SEQ ID NO: 336

SEQ ID NO: 1729 - protein, 34 aa, Porcine reproductive and respiratory syndrome virus; identical to SEQ ID NO: 336

SEQ ID NO: 1730 - protein, 34 aa, Porcine reproductive and respiratory syndrome virus
SFADGNGNSSAYQYIYNLTICELNGTEWLSNHFS

SEQ ID NO: 1731 - protein, 34 aa, Porcine reproductive and respiratory syndrome virus
SFVDGSDNSSTYQYIYNLTICELNGTAWLSGHFD

SEQ ID NO: 1732 - protein, 34 aa, Porcine reproductive and respiratory syndrome virus
SFVDGSNNSSTYQYIYNLTICELNGTKWLSSHFD

SEQ ID NO: 1733 - protein, 34 aa, Porcine reproductive and respiratory syndrome virus; identical to SEQ ID NO: 399

SEQ ID NO: 1734 - protein, 34 aa, Porcine reproductive and respiratory syndrome virus; identical to SEQ ID NO: 22

SEQ ID NO: 1735 - protein, 34 aa, Porcine reproductive and respiratory syndrome virus; identical to SEQ ID NO: 336

SEQ ID NO: 1736 - protein, 34 aa, Porcine reproductive and respiratory syndrome virus
SFVDGNDNSSTYQYIYNLTICELNGTKWLSSHFD

SEQ ID NO: 1737 - protein, 34 aa, Porcine reproductive and respiratory syndrome virus
SFADGNGNNSTYQYIYNLTICELNGTDWLSNHFS

SEQ ID NO: 1738 - protein, 34 aa, Porcine reproductive and respiratory syndrome virus
SFVDGNGTNSTYQYIYNLTICELNGTHWLSDHFE

SEQ ID NO: 1739 - protein, 34 aa, Porcine reproductive and respiratory syndrome virus
SFADGNGNNSTYQYIYNLTICELNGTDWLSGHFE

SEQ ID NO: 1740 - protein, 34 aa, Porcine reproductive and respiratory syndrome virus
LVNASDSSSSHLQLIYNLTLCELNGTDWLADKFD

SEQ ID NO: 1741 - protein, 34 aa, Porcine reproductive and respiratory syndrome virus; identical to SEQ ID NO: 655

SEQ ID NO: 1742 - protein, 34 aa, Porcine reproductive and respiratory syndrome virus
LVNANSSSSSHLQLIYNLTLCELNGTDWLAERFD

SEQ ID NO: 1743 - protein, 34 aa, Porcine reproductive and respiratory syndrome virus
LVNANSNSSSHLQLIYNLTLCELNGTDWLAQKFD

SEQ ID NO: 1744 - protein, 34 aa, Porcine reproductive and respiratory syndrome virus; identical to SEQ ID NO: 502

SEQ ID NO: 1745 - protein, 34 aa, Porcine reproductive and respiratory syndrome virus
LVNADSNSSSHLQLIYNLTLCELNGTDWLANKFD

SEQ ID NO: 1746 - protein, 34 aa, Porcine reproductive and respiratory syndrome virus
LVNANSNSSSHFQLIYNMTLCELNGTDWLAGKFD

SEQ ID NO: 1747 - protein, 34 aa, Porcine reproductive and respiratory syndrome virus
LVNANNSSSSHLQLIYNLTLCELNGTDWLANKFD

SEQ ID NO: 1748 - protein, 34 aa, Porcine reproductive and respiratory syndrome virus
LVNANSDSSSHLQLIYNLTLCELNGTDWLANRFD

SEQ ID NO: 1749 - protein, 34 aa, Porcine reproductive and respiratory syndrome virus
LVNANSSSSSHLQLIYNLTLCELNGTDWLANKFD

SEQ ID NO: 1750 - protein, 34 aa, Porcine reproductive and respiratory syndrome virus
LVSANGNSSSHLQLIYNLTLCELNGTDWLADKFD

SEQ ID NO: 1751 - protein, 34 aa, Porcine reproductive and respiratory syndrome virus
LVNANSSNSSHLQLIYNLTLCELNGTDWLANRFD

SEQ ID NO: 1752 - protein, 34 aa, Porcine reproductive and respiratory syndrome virus; identical to SEQ ID NO: 38

SEQ ID NO: 1753 - protein, 34 aa, Porcine reproductive and respiratory syndrome virus
LVNANSNSSSHLQLIYNLTLCELNGTEWLADKFD

SEQ ID NO: 1754 - protein, 34 aa, Porcine reproductive and respiratory syndrome virus
LVNANNSTSSHLQLIYNLTLCELNGTDWLADKFD

SEQ ID NO: 1755 - protein, 34 aa, Porcine reproductive and respiratory syndrome virus
LVNANSDSSSHLQLIYNLTLCELNGTDWLAEKFD

SEQ ID NO: 1756 - protein, 34 aa, Porcine reproductive and respiratory syndrome virus; identical to SEQ ID NO: 226

SEQ ID NO: 1757 - protein, 34 aa, Porcine reproductive and respiratory syndrome virus
LVNANSNSSSHFQLIYNLTLCELNGTDWLAQKFD

SEQ ID NO: 1758 - protein, 34 aa, Porcine reproductive and respiratory syndrome virus; identical to SEQ ID NO: 655

SEQ ID NO: 1759 - protein, 34 aa, Porcine reproductive and respiratory syndrome virus; identical to SEQ ID NO: 1505

SEQ ID NO: 1760 - protein, 34 aa, Porcine reproductive and respiratory syndrome virus; identical to SEQ ID NO: 15

SEQ ID NO: 1761 - protein, 34 aa, Porcine reproductive and respiratory syndrome virus
LANASTNSSSHLQLIYNLTLCELNGTDWLANRFD

SEQ ID NO: 1762 - protein, 34 aa, Porcine reproductive and respiratory syndrome virus; identical to SEQ ID NO: 563

SEQ ID NO: 1763 - protein, 33 aa, Porcine reproductive and respiratory syndrome virus
SFVAGGSSSTYQYIYNLTICELNGTDWLSNHFD

SEQ ID NO: 1764 - protein, 34 aa, Porcine reproductive and respiratory syndrome virus; identical to SEQ ID NO: 15
